(19) United States
(12) Patent Application Publication
(10) Pub. No.: US 2012/0244178 A1
(43) Pub. Date: Sep. 27, 2012

(54) Plasmodium falciparum antigens

(76) Inventors: Denise Doolan, QLD (AU); Angela Trieu, QLD (AU); Phillip L. Felgner, Rancho Santa Fe, CA (US)

(21) Appl. No.: 13/426,768

(22) Filed: Mar. 22, 2012

Related U.S. Application Data
(60) Provisional application No. 61/467,517, filed on Mar. 25, 2011.

(51) Int. Cl. A61K 39/015; A61P 33/06; A61P 37/04; C07K 14/445; C12N 15/63

(52) U.S. Cl. 424/191.1; 530/350; 435/320.1

(57) ABSTRACT

The invention relates to antigens, associated with sterile immunity, and methods of their use, in an immunogenic formulation to confer an immune response against Plasmodium falciparum. The inventive antigens were identified by their association with sterile immunity against malaria.

[0001] This application claims the benefit of U.S. Provisional Application No. 61/467,517, filed Mar. 25, 2011, which is incorporated herein by reference.

### BACKGROUND OF INVENTION

[0002] 1. Field of Invention

[0003] The inventive subject matter relates to DNA sequences and polypeptides from Plasmodium falciparum for use as an anti-malaria vaccine component and methods of inducing an immune response to these antigens.

[0004] 2. Background Art

[0005] Malaria is caused by the vector borne organism Plasmodium spp. The parasite has a complex lifecycle requiring stage specific expression of proteins. These proteins can be expressed at different stages or be specific to stages. Malaria is an extremely important disease, with over 3 billion people living in malaria endemic areas. Over 1 million deaths are attributable to malaria per year. The emergence of drug resistant strains has compounded the problem of treating the disease. Unfortunately, no FDA-approved vaccine exists.

[0006] The entire genomic sequence of P. falciparum has been sequenced (Bowman et al., Nature, 400: 532-538 (1999). Gardner, et al. Nature, 419: 498-511 (2002)). The rodent malaria parasite, P. yoelii has also been sequenced (Carbon et al., Nature, 419: 512-519 (2002)). Despite this, however, the development of efficacious anti-malaria vaccines has been severely hampered by the paucity of promising antigens. Sequencing of the Plasmodium falciparum and Plasmodium yoelii genomes yielding identification over 5,200 genes in the genome. However, despite the large number of potential gene targets, use of the data set alone will not likely result in new vaccine constructs. Consequently, only 0.2% of the P. falciparum proteome is undergoing clinical testing. Moreover, these vaccine candidate antigens have failed to induce significant protection in volunteers. Nevertheless, immunization of mice and humans with radiation-attenuated sporozoites results in a high-grade immunity (>90%), suggesting that development of effective anti-malaria vaccines are possible. This protective immunity appears to target multiple sporozoite and liver stage antigens.

### SUMMARY OF THE INVENTION

[0007] The invention relates to a vaccine composition and method of immunizing against Plasmodium falciparum. The inventive composition comprises P. falciparum liver-stage proteins associated with sterile protection against infectious P. falciparum. In one embodiment, the proteins can be incorporated into an immunogenic composition, singly or in multiple combinations, as subunit antigens. In another embodiment, for maximal immunogenicity, all identified proteins are included in a single immunogenic composition. Alternatively, multiple combinations of the proteins are administered in an immunization regimen through more than one immunogenic composition, each combination containing a specific combination of said immunogenic proteins. In one embodiment, the immunogenic composition comprises one of the identified proteins that has been isolated and purified. In another embodiment, the immunogenic composition comprises two or more, and up to all 19, of the identified proteins that have been purified and isolated.

[0008] In another embodiment, DNA encoding one or more of these proteins can be incorporated into vectors suitable for in vivo expression in a mammalian host. The expressed and purified proteins can then be administered, in one or multiple doses, to a mammal, such as humans. In this embodiment, DNA encoding one or more of the sterile-immunity associated proteins can be inserted into suitable expression systems. Suitable expression systems include, but are not limited to, adenoviral based systems, such as in Bruder, et al (patent application publication number US 20080248060, published Oct. 9, 2008) or a DNA plasmid system. In this embodiment, other vector systems include the DNA encoding P. falciparum is administered as an insert of the suitable expression system and expressed in vivo. In this embodiment, an immunogenic composition can comprise DNA encoding one or more, or all, of the sterile-immune associated proteins. The proteins can be expressed by a single vector encoding one or more of the proteins or by multiple expression systems suitable for expression of DNA in a mammal.

### BRIEF DESCRIPTION OF DRAWINGS

[0009] FIG. 1. Summary of selection criteria and AUC profile. (A) Analyses were conducted to identify antigens that are associated with sporozoite-induced protection. After spot quantification, the signal intensity was asinh/vsn log transformed to control variance, scaled by the negative control, post-immunization (post-I) and pre-challenge (pre-C) time points combined, and then analyzed according to defined statistical (Bayes-regularized t-tests, area under the receiver operating characteristics curve (AUC) analysis) and biological criteria. A total of 86 fragments (78 P. falciparum proteins) were identified by either approach through the global irradiated sporozoite list. Sterile immunity-associated proteins were in common to both approaches. (B) AUC values of all antigens for the not protected and protected cohorts were determined by R statistical environment software (available through: www.r-project.org). Antigen rank is plotted relative to their AUC value. An AUC value approaching 1.0 suggests a very strong association of an antigen to protection induced by irradiated sporozoite immunization; an AUC value of 0.5 indicates pure chance. An AUC value of 0.7 was chosen as a threshold for positivity.

[0010] FIG. 2. Magnitude and frequency of recognition of the proteins in Table 1 associated with irradiated sporozoite induced protection. For the antigens (ranked by AUC), the cumulative signal intensity representing the sum of signal intensities for each antigen by all subjects from protected or not protected groups are presented. ***P<0.0055.

[0011] FIG. 3. Magnitude and frequency of recognition of the proteins in Table 1 associated with irradiated sporozoite induced protection. Frequency of recognition of proteins by protected (P) and not protected (NP) individuals. # represents current clinical candidates: AMA1 (PF11_{—}0344); CSP (PFC0210c); SSP2/TRAP (PF13_{—}0201).

[0012] FIG. 4. Magnitude and frequency of recognition of the proteins in Table 1 associated with irradiated sporozoite induced protection. Average signal intensities of the antigens for each clinical group (protected, white bar; not protected, black bar) are presented as histograms, with antigen IDs listed on the x-axis. The average signal intensity (±s.e.m) for each antigen is shown. Antigens are ordered by decreasing AUC value.

### DETAILED DESCRIPTION OF PREFERRED EMBODIMENTS

[0013] As used, herein, “sterile immunity” refers to immunity, whereby the causative agent of the targeted disease causing organism is eliminated or inhibited from causing disease.

[0014] As used herein, the term “polypeptide” refers to a polymer of amino acids and does not refer to a specific length of the product. Proteins are included within the definition of polypeptides. As used herein, the proteins may be prepared for inclusion of an effective amount of one or more polypeptides described herein into an immunogenic composition by a number of means. For example, they may be included by first expressing the appropriate gene fragments by molecular methods, expression from plasmids or other expression systems such as viral systems and then isolated.

[0015] As used herein, “immunogenic fragments” of proteins refers to regions of proteins at least 8 amino acids in length, with the amino acid sequence derived from said protein, the fragment being capable of inducing an immune response or that is recognized by immune cells.

[0016] As used herein, “derivatives” of a protein is where a protein has more than 80% amino acid sequence identity to the sequences described herein. In this context, the term “identity” refers to two or more sequences or subsequences that are the same or have a specified percentage of amino acid residues that are the same, when aligned for maximum correspondence. Where sequences differ in conservative substitutions, i.e., substitution of residues with identical properties, the percent sequence identity may be adjusted upwards to correct for the conservative nature of the substitution.

[0017] As used herein, an aspect of the invention relates to nucleotide sequences that encode all or a substantial portion of the amino acid sequence encoding identified proteins or substantial portions, thereof. A “substantial portion” of a protein comprises enough of the amino acid sequence to afford putative identification of the protein the sequence encodes (Altschul, et al., J. Mol. Biol. 215: 403-410 (1993)). Furthermore, in general, this is approximately nine or more contiguous amino acids can lead to identification of the protein as homologous to a known protein. “Orthologous” nucleotide sequences are sequences encoding for proteins of the same function but in different species.

[0018] “Antigen” is a chemical moiety containing at least one epitope capable of stimulating or reacting with immune products, such as antibody or T-cells. An “immunogenic composition” refers to a chemical, compound or formulation that, once administered, will elicit an immune response; A “vaccine” is an immunogenic composition used to induce protective immunity; A “DNA expression system” is a molecular system containing plasmid or closed loop DNA containing elements for expressing an inserted DNA sequence as polypeptide; A “viral expression system” is any viral based system, including viral-like particles or viral replicons, containing elements for expressing an inserted DNA sequence as a polypeptide.

### Example 1

### Identification of Sterilely-Immune Associated Proteins

[0019] This example illustrates the identification of proteins associated with sterile immune against malaria. In this example, volunteers, experimentally immunized with radiation attenuated P. falciparum sporozoites (Irrspz), were clinically divergent after challenge with infectious P. falciparum sporozoites; six individuals were sterilely-protected and were classified as sporozoite-immune (IrrSpz protected) and five individuals developed blood stage parasitemia and were classified as sporozoite-exposed but non-immune (IrrSpz not protected).

[0020] Subjects were experimentally immunized with radiation-attenuated P. falciparum, (Pf(3D7)), sporozoites and challenged with P. falciparum-infected Anopheline mosquitoes, as described previously (Hoffman, et al., J. Infect. Dis. 185:1155-1164 (2002); Egan, et al., Am. J. Trop. Med. Hyg. 49:166-173 (1993)). Subjects were monitored daily, post-challenge, by thin blood smears to determine if they developed blood stage malaria. A complete absence of blood stage parasitemia during the 28 day follow up was considered sterile protection.

[0021] Six sporozoite-immunized volunteers were protected against sporozoite challenge and five were not protected (i.e. developed clinical malaria). One individual is represented in both groups since he was not protected in the initial challenge but was after a second series of immunizations. Plasma was collected from each individual before immunization (pre-immunization), post third immunization, at the completion of the immunization series (5th, 6th, or 7th immunization), immediately prior to challenge (pre-challenge) and following challenge (post-challenge). An infectivity control group (n=3) was simultaneously infected with the same P. falciparum-infected mosquitoes used for challenge to demonstrate parasite infectivity; plasma was collected from these individuals at corresponding time points before (pre-challenge) and after (post-challenge) challenge. An additional group (n=5) were mock immunized by the bite of non-infected mosquitoes and plasma was collected at the time points corresponding to pre-immunization, post-third immunization and post last immunization time points of the IrrSpz immunized subjects. Plasma collected from volunteers with no known history of malaria exposure (n=10) was also evaluated.

[0022] To identify antigens associated with IrrSpz-induced protection, plasma collected from protected, not protected, infectivity, mock immunized and naïve individuals at different stages of the immunization process (or corresponding time points for the non-immunized individuals) were probed on P. falciparum microarrays against 2,320 fragments, representing 1,200 P. falciparum proteins. Antibody recognition of each fragment was then assessed.

[0023] There were distinct antibody profiles for each immunization group, with variability in responses between individuals within all groups. Overall, a markedly different pattern in antibody recognition was apparent between the protected and not protected groups, consistent with previous data (Doolan, et al, Proteomics 8:4680-4694). There was no difference in antibody reactivity at pre-challenge and post-challenge time points for protected individuals who did not develop blood stage parasitemia or clinical disease (P<0.6) and no change in the number of antigens recognized (340 pre-challenge vs. 380 post-challenge).

[0024] Putative proteins, and protein and DNA sequences, were derived from the P. falciparum genomic sequence database (www.plasmodb.org) and selected based on stage-specific transcription or protein expression, subcellular localization, secondary protein structure, and documented immunogenicity in humans or animal models; this list included all putative P. falciparum proteins with evidence of expression at some point during the parasite life cycle by MudPIT (multidimensional protein identification technology) (Florens, et al., Nature 419:520-526 (2002)), www.plasmoDB.org) at the time of antigen selection (n=1049).

[0025] Selected genes were amplified by polymerase chain reaction (PCR) amplification of P. falciparum genomic DNA (3D7 strain) using custom PCR primers that included homologous cloning sites to the pXT7 plasmid (Davies, et al., Proc. Natl. Acad. Sci. (USA) 102:547-552 (2005)). Due to restrictions in producing long PCR products, proteins with exons longer than 3000 bp were divided into multiple overlapping sections, with 50 nucleotide overlaps. PCR reactions were carried out in a 50 μl reaction volume containing 1-10 ng of P. falciparum genomic DNA (gDNA) (3D7 strain), 0.04 U/μl proofreading Taq polymerase (Triplemaster™, Eppendorf, Hauppauge, N.Y.), and 0.4 mM each dNTPs, with the following cycling conditions: 95° C. for 3 min; 35 cycles of 95° C. for 15 s, 40° C. for 30 s and 50° C. for 60 s/kb; and a final extension of 50° C. for 10 min. For some proteins that proved difficult to amplify, 50 ng of gDNA was used. Products were visualized by agarose gel electrophoresis, and quantified by fluorometry (Picogreen™, Molecular Probes®, Invitrogen, Carlsbad, Calif.).

[0026] Plasmids were created from the PCR amplified fragments using in vitro recombination cloning and the pXT7 cloning vector, which encodes an N-terminal 10× Histidine (H is) and C-terminal Haemagglutinin (HA) tag (3.2 kb, KanR). Briefly, 1 ng of Bam HI, digested, linearized pXT7 template and custom primers 5′-CTACCCATACGATGTTCCGGATTAC and 5′-CTCGAGCATATGCTTGTCGTCGTCG were used to generate a linear acceptor vector containing the target gene by PCR (50 μl reaction) with 0.02 U/μl Taq polymerase, 0.1 mg/ml gelatine (Porcine), and 0.2 mM each dNTPs. The following cycling conditions were used: 95° C. for 5 min; 30 cycles of 95° C. for 0.5 min, 50° C. for 0.5 min and 72° C. for 3.5 min; and a final extension of 72° C. for 10 min. After purification (Qiagen, Valencia, Calif.), PCR products were visualized by gel electrophoresis, and quantified by fluorometry (Picogreen™, Molecular Probes®, Invitrogen, Carlsbad, Calif.).

[0027] Open reading frames (ORFs) were cloned into the linearized pXT7 plasmid by a recombination reaction as previously described (Davies, et al., Proc. Natl. Acad. Sci. (USA) 102:547-552 (2005). Briefly, a 20 μl mixture of linear vector and PCR-generated ORF fragment at a 1:1 molar ratio between vector and insert was transformed into DH5a competent cells without further purification and incubated for 1 h at 37° C., before dilution into an overnight culture of 3 ml LB broth containing Kanamycin 50 μg/ml. Plasmids were isolated and purified using the QIAprep™ spin miniprep, (Qiagen, Valencia, Calif.) without further selection. A subset of these plasmids was sequence confirmed.

[0028] Protein expression and detection was conducted using E. coli in vitro cell-free transcription and translation reactions (rapid translation system (RTS) 100 E. coli HY kits, Roche). Reactions were carried out in 25 μl volumes with a 5-hour incubation at 30° C., according to manufacturer's instructions. For quality control purposes, relative protein expression efficiency for approximately 31% of all ORFs was assessed by immunodot blots by spotting 0.3 μl of the RTS reaction on nitrocellulose (NC) and air drying before blocking in 5% nonfat milk powder in TBS containing 0.05% polysorbate 20. Dot blots were stained with mouse anti-polyHlS mAb (clone HIS-1; Sigma) and rat anti-HA mAb (clone 3F10) (F. Hoffmann-La Roche Ltd, Basel, Switzerland) and detected with alkaline phosphatase-conjugated goat anti-mouse IgG (H+L) or goat anti-rat IgG (H+L) secondary antibodies respectively or with human hyperimmune plasma (diluted 1:1000 in blocking buffer with 10% E. coli lysate) followed by alkaline phosphatase-conjugated goat anti-human IgG secondary antibody (H+L). Blots were visualized with nitroblue tetrazolium (NBT) developer.

[0029] Microchips were prepared by mixing 15 μl of RTS reaction with 10 μl of 0.125% polysorbate 20/PBS, and then 15 μl volumes were transferred to 384 well plates. Plates were centrifuged (1600×g, 5 min) to pellet any precipitates and proteins in the supernatant were immediately printed without further purification onto 3-pad NC-coated FAST™ glass slides (Schleicher & Schuell, Bioscience, Inc., Keene, N.H.) using an OmniGrid 100 microarray printer (Genomic Solutions, Ann Arbour, Mich.). Arrays were allowed to dry and stored away from light at room temperature in a desiccator.

[0030] RTS reactions carried out in the absence of DNA plasmids were printed on each array as negative or non-differentially recognized control spots. Purified human total IgG and Epstein-Barr nuclear antigen 1 (EBNA1) protein were also printed in serially diluted concentrations on each array, as probing and plasma controls respectively.

[0031] Since high titers of anti-E. coli antibodies present in the human plasma could mask protein-specific reactivity in the arrays, plasma were pre-absorbed against E. coli lysate in protein array blocking buffer (Schleicher & Schuell) (1:100 dilution) for 30 minutes at room temperature (Davis, et al., Proc. Natl. Acad. Sci. (USA) 102:547-552 (2005).

[0032] Slides were rehydrated and blocked in blocking buffer for 30 min at room temperature. Then 500 μl plasma diluted 1:100 in blocking buffer was added to each pad and slides were incubated overnight at 4° C. with a gentle constant speed on a platform rocker (Ratek™, InVitro Technologies). Serum antibodies were detected with biotin-conjugated goat anti-human IgG secondary antibody (1:1000 dilution, 1 h at room temperature with gentle constant speed, Fc fragment, (Jackson ImmunoResearch Laboratories, Inc, West Grove, Pa.) and visualized with a streptavidin P-3-conjugated antibody (1:200 dilution, 1 h at room temperature with gentle constant speed. Air dried slides were scanned on an Axon GenePix™ 4300A array scanner (Molecular Devices, CA) and fluorescence intensities quantified using the Axon GenePix Pro 7™ software (Molecular Devices, Sunnyvale, Calif.). Using the above software, all signal intensities were corrected for spot-specific background, where the background value for a spot was calculated from a region surrounding the spot.

[0033] To validate the P. falciparum protein microarrays, antibody reactivity to three well characterized malaria vaccine candidates, CSP, AMA1 and merozoite surface protein 2 (MSP2), were expressed via the RTS system or using traditional methods and were printed on the same protein microarray chip. There was a high degree of correlation between reactivity to the proteins produced by the two methods, (CSP (r=0.77; P<0.001), AMA1 (r=0.78; P<0.001). MSP2 (r=0.96; P<0.001)). To examine the reproducibility of the array probing, the reactivity against all HA spots from two independent chips was assessed and was highly correlated (r=0.92. P<0.001). Additionally, a smaller microarray chip was fabricated with a subset of 49 P. falciparum proteins and probed with the same plasma used to probe the larger 2320 fragment P. falciparum protein microarray. There was a strong correlation between plasma reactivity on the two microarrays (r=0.91, P<0.001).

[0034] In order to analyze low and high signal intensities (differential recognition) using standard statistical methods, the heteroskedastic nature of microarray platforms (Durbin, et al. Bioinformatics 18 Suppl. 1:S105-110 (2002): Ideker, et al., J. Comput. Biol 7:805-8) 7 (2000) and inherent variance-mean dependence in the data (Sundaresh, et al., Bioinformatics 22:1760-1766 (2006); Sundaresh, et al. Bioinformatics 23:1508-518 (2007)) needed to be considered and stabilized. Raw signal intensities were therefore variant log transformed by using either asinh (Excel 2007, Microsoft; (Sundaresh, et al., Bioinformatics 22:1760-1766 (2006)) or variance stabilizing normalization (vsn) (Bioconductor software (www.bioconductor.org) (Huber, et al. Bioinformatics 18 suppl. 1:S96-104 (2002)) transformation, to reduce the variance and experimental effects in the raw signal between differentially recognized antigens.

[0035] Before ranking and selection of antigens, data for each plasma sample was scaled by multiplication to a normalization ratio (average SI of all negative controls for that individual/average SI of all negative controls for all individuals) to apply the same baseline for all plasma. The post-immunization and pre-challenge time points for each individual in each group were combined for sample size purposes, since data showed no significant: differences between those time points, and data was biologically and statistically analyzed. Area under receiver operating characteristic curves (ROC) (AUC) and Bayesian regularized t-tests (R statistical environment software, www.rproject.org) were used to identify differentially recognized antigens between the protected and not protected groups (Baldi and Long, Bioinformatics 17:509-519 (2001)) (FIG. 1). Please note that the statistical testing (both AUC and p-values) have not under gone multiple testing correction, rather these statistics were used as a method to compare the two groups and rank the data accordingly. The identification of antigens of interest was made on the combination of the rankings in addition to other relevant criteria i.e. recognition in different groups.

[0036] The criterion for positive immunoreactivity to a given protein for both transformation methods was determined as an average signal intensity two standard deviation above the negative control (all individuals). Data were visually presented as a heatmap where colors represent the SI range for that antigen. Red represents high SI (reactivity), black represents intermediate reactivity and green represents low reactivity. Gene ontology (GO) annotation analysis was performed using the GOstats and org.Pf.plasmo.db R packages. The significance of annotation enrichment was assessed using Fisher's exact test.

[0037] A marked change in seroreactivity was noted at pre-challenge vs. post-challenge time points for the not protected individuals where there was a significant increase in overall signal intensity (SI) (P<2e-91) and number of antigens recognized (292 pre-challenge vs. 739 post-challenge), consistent with exposure to blood stage antigens upon development of patent parasitemia.

[0038] The profile for the infectivity control individuals also showed a significant increase in SI pre-challenge vs. post-challenge (P<2e-30) to a subset of antigens (289 prechallenge vs. 546 post-challenge) and 89% (546) of the antigens recognized post-challenge were also recognized by the not protected group post-challenge, and therefore appear to be expressed by the blood stage parasite. Minimal reactivity to P. falciparum antigens was noted with plasma from malaria naïve individuals or mock immunized individuals, consistent with a lack of exposure to P. falciparum.

[0039] To identify P. falciparum antigens putatively correlated with protection against sporozoite challenge, normalization and variance correction were performed using either the vsn and asinh methods. Since there were no significant changes in SI or number of antigens recognized at post-3^{rd} immunization or post-last immunization (prechallenge) time points for both protected and not protected groups [P<0.25 (not protected), P<0.2 (protected)], data from these biologically similar time points were combined for subsequent analyses. CyberT™ (Institute for Genomics and Bioinformatics, University of California, Irvine, Calif.) (a Bayesian regularized t-test) p-values and a receiver operating characteristic (ROC) curve of the mean SI were used to measure the power of an antigen to discriminate between protected and not protected cohorts, thus identifying antigens putatively associated with sporozoite-induced protection. The selection criteria are depicted in FIG. 1. An area under the ROC curve (AUC) value of 1.0 is a perfect prediction, 0.5 is a random chance, and <0.5 is a prediction in the wrong direction.

[0040] For both vsn and asinh approaches, antigens were selected according to the Following criteria: (i) antigenic (protected); i.e. average SI greater than two standard deviations (SD) above negative control; (ii) recognized by at least two protected individuals; (iii) average SI greater in the protected group than not protected group; (iv) an AUC value equal to or greater than 0.7; and (v) CyberT™ p-value <0.05 (protected vs. not protected).

[0041] Combining the antigens identified by either approach revealed a total of 86 fragments representing 77 proteins, termed “global IrrSpz” list. Five proteins (PF14_{—}0051, PFI0240c, PF10_{—}0183, PF10_{—}0211, MAL13P1.107) have two immunoreactive fragments on this list and two proteins (PF11_{—}0395, MAL7P1.146) have three fragments, since open reading frames (ORFs)>3000 bp were cloned as overlapping segments. When ranked by AUC values, five antigens on this list (6%) have an AUC value greater than 0.9 (1.5e-3<P>3.8e-3), and 31 antigens (36%) have an AUC greater than 0.8 (1.5e-3<P>4.43e-2).

[0042] The global IrrSpz list included three current vaccine candidates: AMA1 (PF11_{—}0344), CSP (PFC0210c), and SSP2/TRAP (PF13_{—}0201). Interestingly, these were highly antigenic in protected individuals, with 92% (AMA1), 100% (CSP) and 100% (SSP2/TRAP) recognition within this cohort, but were also recognized to a similar extent by not protected individuals (92%, 100%, 100%, respectively). The other 75 proteins on this list have not been previously characterized.

[0043] A subset of 20 fragments representing 19 proteins was common to both vsn and asinh approaches. These are shown in Table 1. Three of these antigens (i.e., PFB0285c, PFE1085w, PF08_{—}0054) were not recognized by not protected individuals and 10 of the antigens had a higher frequency of recognition in the protected cohort as compared with the not protected cohort. Seven antigens (including CSP, SSP2/TRAP, and AMA1) were recognized at a similar frequency by the two cohorts but the protected individuals had a significantly higher magnitude of response (0.0034<P>0.0077, 2-4 fold higher average SI) (FIG. 2).

TABLE 1
Characteristics of the Top 20 antigens highly associated with sporozoite-induced protection.

| | | | | | Average signal | | | | | |
|---|---|---|---|---|---|---|---|---|---|---|
| | | | | P value | intensity | | Fold enrich | | | |
| | | | | (Protected | | Not | (Protected | Frequency of recognition | | |
| | | | | v not | Pro- | Pro- | v not | Pro- | Not | Total # |
| Gene ID | Product Description | Details | AUC | Protected) | tected | tected | Protected) | tected | Protected | exons |
| PFI0925w | gamma-glutamylcysteine | exon 1 | 0.917 | 1.67E−03 | 3324 | 1293 | 3 | 100% | 40% | 1 |
| | synthetase | | | | | | | | | |
| PFB0285c | conserved Plasmodium | exon 1 | 0.917 | 2.77E−03 | 1341 | 337 | 4 | 67% | 0% | 1 |
| | protein, unknown | | | | | | | | | |
| | function | | | | | | | | | |
| PF14_0051 ¶ | DNA mismatch repair | exon 4 | 0.888 | 1.52E−03 | 2784 | 553 | 5 | 67% | 30% | 4 |
| | protein, putative | | | | | | | | | |
| PFD0485w | conserved Plasmodium | complete | 0.852 | 7.68E−03 | 12669 | 3205 | 4 | 100% | 90% | 1 |
| | protein, unknown | | | | | | | | | |
| | function | | | | | | | | | |
| PFL1620w | asparagine/aspartate rich | exon 1 | 0.833 | 1.06E−02 | 2471 | 807 | 3 | 92% | 50% | 3 |
| | protein, putative | | | | | | | | | |
| PF10_0211 § | conserved Plasmodium | exon 1 | 0.833 | 4.43E−02 | 1752 | 853 | 2 | 100% | 40% | 5 |
| | membrane protein, | | | | | | | | | |
| | unknown function | | | | | | | | | |
| PF10_0211 § | conserved Plasmodium | exon 2 | 0.833 | 4.43E−02 | 1752 | 853 | 2 | 83% | 40% | 5 |
| | membrane protein, | | | | | | | | | |
| | unknown function | | | | | | | | | |
| PFB0150c | protein kinase, putative | exon 2 | 0.824 | 2.37E−02 | 2528 | 620 | 4 | 50% | 40% | 1 |
| PF11_0344 | AMA1 | complete | 0.824 | 2.88E−02 | 4455 | 2248 | 2 | 92% | 90% | 1 |
| PFE0060w | PESP2 erythrocyte | exon 2 | 0.815 | 9.87E−03 | 5625 | 3030 | 2 | 100% | 30% | 2 |
| | surface protein | | | | | | | | | |
| PF08_0034 | histone acetyltransferase | exon 1 | 0.815 | 3.36E−02 | 2480 | 1293 | 2 | 92% | 100% | 4 |
| | GCN5, putative | | | | | | | | | |
| PF08_0054 | heat shock 70 kDa protein | complete | 0.806 | 1.52E−02 | 1214 | 221 | 5 | 25% | 0% | 1 |
| PFL2140c | ADP-ribosylation factor | exon 1 | 0.806 | 2.16E−02 | 3738 | 965 | 4 | 58% | 40% | 1 |
| | GTPase-activating protein | | | | | | | | | |
| PFC0210c | CSP | complete | 0.800 | 1.72E−02 | 15118 | 10066 | 2 | 100% | 100% | 1 |
| PFE1085w | DEAD-box subfamily | exon 1 | 0.796 | 1.03E−02 | 1201 | 203 | 6 | 42% | 0% | 1 |
| | ATP-dependent | | | | | | | | | |
| | helicase, putative | | | | | | | | | |
| PF11_0404 | transcription factor with | exon 2 | 0.787 | 3.42E−02 | 2907 | 1542 | 2 | 100% | 90% | 3 |
| | AP2 domain(s), putative | | | | | | | | | |
| PF13_0201 | SSP2/TRAP | complete | 0.769 | 3.11E−02 | 29578 | 9818 | 3 | 100% | 100% | 1 |
| PFL2505c | rhoptry neck protein 3, | exon 8 | 0.759 | 1.57E−02 | 4011 | 1531 | 3 | 100% | 80% | 8 |
| | putative | | | | | | | | | |
| PF13_0222 | phosphatase, putative | exon 1 | 0.750 | 4.98E−02 | 4243 | 960 | 4 | 58% | 30% | 1 |
| MAL13P122 | DNA ligase I | exon 2 | 0.713 | 3.91E−02 | 1739 | 466 | 4 | 50% | 10% | 2 |

| | | | | | | | | | Presence in | |
|---|---|---|---|---|---|---|---|---|---|---|
| | | | | | | | | | genomic/ | |
| | | | Mw | | # TM | # | Exported | Signal | proteomic | Functional categories |
| Gene ID | bp | aa | (kDa) | pl | domains | PEXEL/motif | protein | Peptide | datasets | (plasmoDB) |
| PFD825w | 3192 | 1063 | 124.46 | 5.1 | 0 | 0 | no | no | yes | Protein Synthesis |
| PFB0285c | 4311 | 1436 | 164.85 | 10.04 | 0 | 0 | no | no | yes | Hypothetical |
| PF14_0051 ¶ | 4548 | 1515 | 179.83 | 8.9 | 0 | 1 | no | yes | yes | Cell Cycle (DNA |
| | | | | | | | | | | processing) |
| PFD0485w | 1728 | 575 | 68.53 | 9.42 | 0 | 0 | no | no | yes | Hypothetical |
| PFL1620w | 16320 | 5439 | 646.34 | 6.38 | 0 | 1 | no | no | yes | Protein Synthesis |
| PF10_0211 § | 20805 | 6934 | 830.20 | 9.51 | 5 | 4 | no | no | yes | Hypothetical |
| PF10_0211 § | 20805 | 6934 | 830.20 | 9.51 | 5 | 4 | no | no | yes | Protein Synthesis |
| PFB0150c | 7458 | 2485 | 293.77 | 7.21 | 0 | 0 | no | no | yes | Hypothetical |
| PF11_0344 | 1869 | 622 | 72.04 | 5.23 | 1 | 0 | no | yes | yes | Cell Surface (Apical |
| | | | | | | | | | | organelle [symbol] |
| PFE0060w | 1227 | 408 | 48.72 | 7.19 | 3 | 1 | yes | yes | no | Hypothetical |
| PF08_0034 | 4398 | 1465 | 170.92 | 6.65 | 0 | 0 | no | no | yes | Metabolism |
| PF08_0054 | 2034 | 677 | 73.92 | 5.33 | 0 | 0 | no | no | yes | Cell Cycle (DNA |
| | | | | | | | | | | processing) |
| PFL2140c | 999 | 332 | 37.29 | 5.42 | 0 | 0 | no | no | yes | Hypothetical |
| PFC0210c | 1194 | 397 | 42.65 | 5.18 | 1 | 2 | no | yes | yes | Virulence |
| PFE1085w | 2526 | 841 | 97.34 | 7.96 | 0 | 3 | no | no | yes | Cell Cycle (DNA |
| | | | | | | | | | | processing) |
| PF11_0404 | 7962 | 2653 | 309.45 | 6.12 | 0 | 0 | no | no | yes | Transcription |
| PF13_0201 | 1725 | 574 | 64.74 | 4.7 | 0 | 1 | no | yes | yes | Hypothetical |
| PFL2505c | 6648 | 2215 | 263.16 | 9.62 | 3 | 0 | no | yes | yes | Hypothetical |
| PF13_0222 | 1728 | 575 | 67.56 | 5.08 | 0 | 0 | no | no | no | Protein Synthesis |
| MAL13P122 | 2739 | 912 | 104.51 | 7.66 | 0 | 1 | no | yes | yes | Cell Cycle (DNA |
| | | | | | | | | | | processing) |

[symbol]

indicates data missing or illegible when filed

[0044] The 10 antigens on the global list with the highest AUC values (0.86-0.93) also had very low p values (protected vs. not protected; 0.0015-0.033). Unexpectedly, all of these antigens had an average SI below 3000 (protected), suggesting that high antibody recognition and reactivity (i.e., serodominance) to a single antigen does not correlate with sporozoite-induced protection. Indeed, the average SI for 75 of the 86 antigens was below 5000, and 80 of the 86 were below 10000.

[0045] As shown in FIG. 2, protected individuals had a significantly greater cumulative antibody response to the antigens of Table 1, as compared to not protected individuals (P<0.0055). FIG. 4 shows the average signal intensities of the 20 antigens in Table 1 for each clinical group. This remarkable difference in cumulative response between the protected and non-protected individuals, suggests that sterile immunity is associated with a panel of antigens, not with individual antigens.

[0046] The majority of the global IrrSpz list (93%; 72/77 proteins) and genes in Table 1 (89%, 17/19 proteins) were detected via independent mass spectrometry (MS/MS) analysis of sporozoites (Florens, et al., Nature 419:520-526 (2002); Hall, et al., Science 307:82-86 (2005); Lasonder, et al., PLoS Pathog. 4:e1000195 (2008); Kappe, et al., Proc. Natl. Acad. Sci. (USA) 98:9895-9900 (2001)) or liver stage and/or sporozoite gene expression data (Kappe, et al., Proc. Natl. Acad. Sci. (USA) 98:9895-9900 (2001); Le Roch, et al., Science 301:1503-1508 (2003); Rosinski-Chupin, et al., BMC Genomics 8:466 (2007); Siau, et al., PLoS Pathog. 4:e1000121 (2008); Tarun, et al., Proc. Natl. Acad. Sci. (USA) 105:305-310 (2008)), PlasmoDB™), validating the expression of the genes during the pre-erythrocytic stage of the parasite life cycle.

### Example 2

### Characterization of Antigens Associated with Protection

[0047] This example illustrates the characterization of the proteins associated with protection. To identify specific genomic or proteomic features of antigens putatively associated with IrrSpz-induced protection, selected characteristics of the global IrrSpz list and the proteins listed in Table 1 were compared to the Plasmodium falciparum genome and to the known blood stage antigens (BSA) and sporozoite/liver stage antigens (SLA). The antigens from the global IrrSpz list and genes listed in Table 1 average respectively 3 and 2.5 fold larger for their transcription length, protein length and molecular weight as compared to the Plasmodium falciparum genome, BSA or SLA (Table 2); this is consistent with the fact that large proteins potentially present a greater number of B cell epitopes for antibody recognition. There was no difference in average isoelectric points (pI) or the number of exons compared to the P. falciparum genome, although the BSA and SLA had a lower average pI value than the other groups (Table 2).

TABLE 2
Comparison of genomic and proteomic features from antigens associated with
protection¹

| | | | Known | Known | |
|---|---|---|---|---|---|
| | Top 20 | Global | sporozoite/liver | blood stage | Pf |
| | list | list | stage antigens | antigens | genome |
| | (n = 20) | (n = 86) | (n = 7) | (n = 17) | (n = 5479) |
| Ave number of Exons | 2.3 | 3 | 1.6 | 1.9 | 2.5 |
| Ave Transcription Length (bp) | 5711 | 6909 | 2245 | 2274 | 2270 |
| Ave protein length (aa) | 1902 | 2302 | 747 | 760 | 755 |
| Ave pI value | 7.1 | 7.8 | 5.3 | 5.3 | 8 |
| Ave Mw (kDa) | 224 | 272 | 85 | 87 | 89 |
| Number with TM domains | 30% | 34% | 71% | 41% | 31% |
| Number with Signal peptide | 35% | 24% | 100% | 65% | 19% |
| Number with PEXEL motif | 45% | 53% | 71% | 23% | 27% |

¹Characteristics of the global irradiated sporozoite list and top 20 list (i.e., antigens in Table 1) are compared to known vaccine candidates and the P. falciparum genome (PlasmoDB ™). Attributes such as average (Ave) number of exons, gene (bp) and protein (aa) size, isoelectric point (pI), presence of features that are recognized by antibodies (transmembrane domains, signal peptide, (PEXEL motif), were compared.

[0048] An enrichment of Plasmodium export element (PEXEL) motifs was noted in a global IrrSpz list (2-fold, Table 2) compared to whole genome and known BSA. The global list of revealed 86 fragments representing 77 proteins.

[0049] PEXEL motifs are found in five of seven known SLA, consistent with a function in the transport of liver stage parasite proteins to hepatocytes. Although signal peptides have been identified in all known SLA and 11 of 17 known BSA, consistent with a role for secretion in inducing antibody responses, antigens containing a signal peptide were not enriched in the proteins in Table 1 (35%, 7/20, p-value=0.08) or global list (24%, 21/68, p-value=0.31). These data are consistent with the concept that IrrSpz protection is mediated by T cells rather than antibodies. Also consistent with this is the observation that only 30% (p-value=0.64) and 34% (p-value=0.9) of genes in Table 1 or Global IrrSpz list antigens, respectively, had defined transmembrane domains, which are associated with exposure of surfaces for antibody recognition (Table 2).

[0050] Identified proteins were assigned functional categories based on annotation information available from PlasmoDB (PlasmoDB: a functional genomic database for malaria parasites. Nucleic Acids Res. 2008 Oct. 31. Aurrecoechea C, et al). Fifty-six percent of the global and 40% of the 20 sterile immunity-associated proteins were hypothetical proteins, with the remainder assigned to multiple functional categories. Interestingly, the functional categories for the proteins in Table 1 showed a notable concentration of genes/proteins involved in or regulating DNA processing/cell cycle (20%) and protein synthesis (20%): cellular communication, transport facilitation and protein fate were not represented in this subset. Gene ontology analysis also indicates an overrepresentation of biological processes involving DNA, invasion and metabolic processes, DNA related activity and perhaps a localization of these proteins for invasion purposes.

### Example 3

### Immunogenic Composition and Method of Use for Immunizing Against Malaria Using Identified Proteins

[0051] This example illustrates a method of inducing an immune response against malaria. In a preferred embodiment, one or more of the identified proteins listed in Table 1, associated with sterile immunity, can be incorporated in an immunogenic composition, such as a vaccine. In one example, all of the proteins listed in Table 1 can be incorporated into an immunogenic composition.

[0052] In this embodiment, the immunogenic composition can be a subunit immunogenic composition or vaccine, composed of one or more of the isolated proteins, or immunogenic fragments or derivatives of the proteins, selected from the list of proteins in Table 1 that afforded sterile protection against malaria. Alternatively, an immunogenic composition or vaccine can be composed of nucleic acid, encoding one or more of the proteins of Table 1, or immunogenic fragments or derivatives of the proteins, inserted into one or more expression systems suitable for expression in mammals, such as humans. Table 3 lists the proteins from Table 1 and their associated sequence identification numbers.

TABLE 3
Summary of Sequence Numbers

| Protein | Sequence ID | SEQ ID. No. |
|---|---|---|
| Designation | No. (DNA) | (Polypeptide) |
| PF10925w | 1 | 2 |
| PFB0285c | 3 | 4 |
| PF14_0051 | 5 | 6 |
| PFD0485w | 7 | 8 |
| PFL1620w | 9 | 10 |
| PF10_0211 | 11 | 12 |
| PFB0150c | 13 | 14 |
| PF11_0344 | 15 | 16 |
| PFE0060w | 17 | 18 |
| PF08_0034 | 19 | 20 |
| PF08_0054 | 21 | 22 |
| PFL2140c | 23 | 24 |
| PFC0210c | 25 | 26 |
| PFE1085w | 27 | 28 |
| PF11_0404 | 29 | 30 |
| PF13_0201 | 31 | 32 |
| PFL2505c | 33 | 34 |
| PF13_0222 | 35 | 36 |
| MAL13P1.22 | 37 | 38 |

[0053] It is contemplated that the antigen(s) can be expressed either as a component of a DNA vaccine or other platform system. An example of a contemplated expression system includes, but is not limited to, viral systems, including replicating and nonreplicating vectors. Examples of contemplated viral vectors include adenovirus, alphavirus, poxvirus, cytopmegalovirus, canine distemper virus and yellow fever virus. The antigen(s) could be incorporated as an insert of a DNA or other vaccine expression system, either as a single antigen or multiple antigen expression systems from a single or multiple promoters.

[0054] The contemplated invention includes a method for inducing an immune response in mammals, including humans. In this example, antigen(s), either as polypeptide or incorporated into a nucleic acid expression system, such as a DNA or viral system, are administered in one or more doses. The method also contemplates inducing an immune response utilizing a prime-boost immunization regimen. In this embodiment, one or more priming immunization doses would be administered followed by one or more boosting immunizations.

[0055] The priming and boosting immunization comprises a composition containing a malaria polypeptide, wherein the polypeptide contains one or more of the polypeptide sequences of Table 3, or immunogenic derivatives, thereof. Alternatively, the immunogenic composition can comprise an expression system capable of expressing the polypeptides in mammals. In this embodiment, nucleic acid molecules, listed in Table 3 or encoding the polypeptides, or derivatives thereof, of Table 3 can be inserted into a DNA plasmid or a viral expression vectors. Examples of viral expression vector systems include: alphavirus (and alphavirus replicons), adenovirus, poxvirus, adeno-associated virus, cytomegalovirus, canine distemper virus, yellow fever virus and retrovirus.

[0056] The contemplated methods also include immunization regimens wherein the priming immunization comprises malarial peptides expressed from a DNA plasmid expression vector or an adenovirus, while the boosting immunization includes malaria peptides expressed from either: adenovirus, adenovirus that is heterologous to the priming adenovirus, poxvirus or one or more malaria polypeptides. The expressed malaria polypeptide and encoding nucleic acid can be any of a number of malarial polypeptides and nucleic acid sequences Table 3, or immunogenic derivatives of the polypeptides, thereof.

### Example 4

### Blood Stage Specific Antigens

[0057] A strong immune response to all well characterized blood stage antigens was also seen post-challenge in a cohort that was not afford protection. As expected, negligible responses to antigens known to be expressed at the blood stage were observed in the protected cohort and no changes in their heatmap profile occurred throughout the study time course.

[0058] Analysis of the responses post challenge for the not protected cohort allowed identification of novel blood stage specific P. falciparum antigens, using the following criteria: (i) antigenic; i.e. average SI greater than two SDs above negative control in at least two not protected individuals; (ii) statistically significant recognition (p) after challenge as compared to pre challenge <0.05 (not protected); and (iii) not recognized by protected subjects.

[0059] As illustrated in Table 4, a total of 23 antigens met these criteria, of which two have been previously characterized (MSP1 [PFI1475w] and liver stage antigen 3 [LSA3, PFB0915w]) and 21 are novel. The sequence identification numbers of the proteins in Table 4 and the DNA encoding these proteins are shown in Table 5.

TABLE 4

| | | | Present in | | Irradiated | |
|---|---|---|---|---|---|---|
| | | | orthologue | Naturally | sporozoite and | |
| | Present | Present | P. yoelii | acquired | naturally acquired | |
| | iRBC MS | Merozoite MS | blood stage | immunity | immunity study | |
| | (Florens, | (Florens, | (Watanabe, | (Crompton, | (Doolan, | |
| Gene ID | et al., (2004)) | et al., (2002)) | et al., (2007)) | et al., (2010)) | et al., (2008)) | Protein description |
| PFI0855w | No | No | No | Yes | No | Hypo. Protein |
| PF14_0198 | Yes | Yes | Yes | No | No | Gly. tRNA ligase |
| | | | | | | (putative) |
| PFA0535c | No | No | Yes | No | No | Kinesin (putative) |
| PF08_0018 | No | No | Yes | No | No | Translation initiation |
| | | | | | | factor-like protein |
| PFL1705w | No | No | Yes | No | No | RNA binding protein |
| | | | | | | (putative) |
| MAL6P1.146 | No | No | No | No | No | P. falciparum PK4 |
| | | | | | | protein kinase |
| PFL0410w | No | YES | YES | NO | NO | Cys. Repeat modular |
| | | | | | | protein 3 |
| PFL2440w | No | No | Yes | No | No | DNA repair protein rhp |
| | | | | | | 16 (putative) |
| PFL2520w | No | No | Yes | No | No | Reticulocyte binding |
| | | | | | | protein (pseudogene) |
| PF14_0084 | No | Yes | Yes | No | No | Hypothetical protein |
| PFI1500w | No | No | Yes | No | No | Hypothetical protein |
| PF14_0327 | No | No | Yes | No | No | Methionine |
| | | | | | | aminopeptidase, type II |
| PF11_0270 | Yes | Yes | No | Yes | No | Threonine-tRNA ligase |
| | | | | | | (putative) |
| PF11_0479 | No | Yes | Yes | No | No | Hypothetical |
| PFI0755c | Yes | Yes | Yes | No | No | 6-phosphofructokinase |
| | | | | | | (putative) |
| PF11_0091 | No | Yes | Yes | No | No | Transcription factor |
| | | | | | | (putative) |
| PF14_0315 | No | Yes | Yes | No | No | Hypothetical protein |
| MAL7P1.137 | No | No | Yes | No | No | Kelch protein (putative) |
| PFI1510w | No | No | Yes | No | No | Nucleolar protein Nop 52 |
| | | | | | | (putative) |
| PFI1475w | Yes | Yes | Yes | No | Yes | MSP1 |
| PFB0915w | No | Yes | No | No | Yes | LSA3 |
| PF10_0323 | Yes | Yes | No | No | No | Hypothetical protein |
| MAL8P1.23 | No | Yes | Yes | No | No | Ubiquitin-protein ligase |
| | | | | | | 1 (putative) |

TABLE 5

| | SEQ ID No. |
|---|---|
| Gene ID | (DNA/Protein) |
| PFI0855 | 39/40 |
| PF14_0198 | 41/42 |
| PFA0535c | 43/44 |
| PF08_0018 | 45/46 |
| PFL1705w | 47/48 |
| MAL6P1.146 | 49/50 |
| PFL0410w | 51/52 |
| PFL2440w | 53/54 |
| PFL 2520w | 55/56 |
| PF14_0084 | 57/58 |
| PFI1500w | 59/60 |
| PF14_0327 | 61/62 |
| PF11_0270 | 63/64 |
| PF11_0479 | 65/66 |
| PFI0755c | 67/68 |
| PF11_0091 | 69/70 |
| PF14_0315 | 71/72 |
| MAL7P1.137 | 73/74 |
| PFI1510w | 75/76 |
| PFI1475w | 77/78 |
| PFB0915w | 79/80 |
| PF10_0323 | 81/82 |
| MAL8P1.23 | 83/84 |

[0060] For 22 of the 23 antigens, evidence of their expression at the blood stage has been independently reported from data sets of P. falciparum infected red blood cell MS/MS (Florens, et al., Mol. Biochem. Parasitol. 135:1-11 (2004)), P. falciparum merozoite MS/MS (Florens, et al., Nature 419:520-526 (2002)), P. yoelii 17XNL asexual blood stage EST datasets (P. falciparum orthologs) (Watanabe, et al., Nucleic Acids Res. 35:D431-438 (2007)) and previous P. falciparum protein microarrays which analyzed plasma from individuals with blood stage malaria (Crompton, et al., PNAS 107:6958-6963 (2010); Doolan, et al., Proteomics, 8:4680-4694 (2008)). Four antigens, expressed in both the blood stage and the sporozoite/liver stage of the parasite life cycle, were also identified.

[0061] In a preferred embodiment, one or more of the proteins of Table 4, the sequence identification numbers of which are shown in Table 5, or immunogenic fragments or derivatives of these proteins can be incorporated into an immunogenic composition. Alternatively, the immunogenic composition can comprise DNA encoding the proteins, fragments or derivatives. In this embodiment, DNA encoding the proteins of Table 4, the sequence identification numbers of which are shown in Table 5, can be in one or more expression vectors capable of expression in mammalian hosts. As a further embodiment, one or more of the proteins of Table 4, immunogenic fragments or derivatives, or DNA encoding these proteins, can be incorporated into immunogenic an immunogenic composition with one or more of the proteins of Table 3, or immunogenic fragments or derivatives of these proteins, or DNA encoding these proteins.

[0062] It is contemplated that the antigens can be expressed either as a component of a DNA vaccine, or other platform system. An example of a contemplated expression system includes, but is not limited to, viral systems, including replicating and nonreplicating vectors. Examples of contemplated viral vectors include adenovirus, alphavirus, poxvirus, cytopmegalovirus, canine distemper virus and yellow fever virus. The antigen could be incorporated as an insert of a DNA or other vaccine expression system, either as a single antigen or multiple antigen expression systems from a single or multiple promoters.

[0063] Another embodiment is a method for inducing an immune response in mammals, including humans utilizing the expressed proteins listed in Table 4. The sequence listings corresponding to the DNA sequences of the genes, and their protein expression products, are listed in Table 5. In this embodiment, antigens, either as polypeptide or incorporated into a nucleic acid expression system, such as a DNA or viral system, are administered in one or more doses. The method also contemplates inducing an immune response utilizing a prime-boost immunization regimen. In this embodiment, one or more priming immunization doses would be administered followed by one or more boosting immunizations.

[0064] The priming and boosting immunization comprises a composition containing a malaria polypeptide, wherein the polypeptide contains one or more of the polypeptide sequences of Table 5, or immunogenic derivatives, thereof. Alternatively, the immunogenic composition can comprise an expression system capable of expressing the polypeptides in mammals. In this embodiment, nucleic acid molecules, listed in Table 5 or encoding the polypeptides, or derivatives thereof, of Table Scan be inserted into a DNA plasmid or a viral expression vectors. Examples of viral expression vector systems include: alphavirus (and alphavirus replicons), adenovirus, poxvirus, adeno-associated virus, cytomegalovirus, canine distemper virus, yellow fever virus and retrovirus.

[0065] The contemplated methods also include immunization regimens wherein the priming immunization comprises malarial peptides expressed from a DNA plasmid expression vector or an adenovirus, while the boosting immunization includes malaria peptides expressed from either: adenovirus, adenovirus that is heterologous to the priming adenovirus, poxvirus or one or more malaria polypeptides. The expressed malaria polypeptide and encoding nucleic acid can be any of a number of malarial polypeptides and nucleic acid sequences shown in Table 5, or immunogenic derivatives of the polypeptides, thereof.

[0066] All references, including publications, patent applications and patents, cited are herein incorporated by reference.

[0067] Having described the invention, one of skill in the art will appreciate in the appended claims that many modifications and variations of the present invention are possible in light of the above teachings. It is therefore, to be understood that, within the scope of the appended claims, the invention may be practiced otherwise than as specifically described.

The application's sequence listing, which the Patent Office published only in electronic form, follows.

SEQUENCE LISTING (84 sequences)

SEQ ID NO: 1 - DNA, 3192 bp, Plasmodium falciparum
atgggttttctaaaaatcggaacgccattaagctgggatgatgtacaagatgtgaaatctttaattagattatatggtatattacagtttgtacatgtatataaattaaataaagaccgttatgatgaaaatataatgtttggtgatgaaattgaatatataataataagaaatgatgaaagcttaaaagaatcgtctgccttattatgtgcttctgatttaatagatgaaatgatgaatttagaaagtgttattgactgtcaatatggttcacattggactccagaatattcttcttttactatagaaggtactccatcagtaccatttaaattagatattaattcttcatgttttgttgaagattgtatgagaattagaagaagtaaattaaataatgttcttagtgccgttcaaggagctagagctattacacttccttgttttcctaatgttcttttaaataatagtgttcttatggctagaagaattactggccatgaaagtacaaaaaagaaatttgattcaaaaggaaaagtcgaatttatagaaaatgcgaaaattaaagaaaaggttcataattcaaataataatatacacaaaataattaataataaaaacaatgaatctaaaattgttaataatgcatttgatcaaaataaaatctcttctattgaaatggtatcctatgagatggatgaaaataaatctaccaattttgttaattcagatacagtatttgcaaaaaatgacgaagaaggagaagtagaagaagaagacgaaaatgaaaacgaacaacaacaacaacagcaacaataccaatcgaatttacaacaacaaaatgtacaaccaaaacaacgtcaacaaatgatacaatatgtctatgatgatgaaatagaaaataaaaataaagaaaaggataatacaccaagaagctgtaatgattacaataatgttaatgatagttcaaatacacaagatatatttattagttcattaaaaaaaacagattcacttttcgaatgtgaagtttttaaacctgaacaaacaaataaatatagtaaaagtgcacttattacagatatgactataagtcctcatgccagatatgttaccttaacacaaaatataagaaaacgaagaggaaccaaaattgtatcctttaatcctatatataaagatattaataccgaaaaaatggatcactggaaaatgtcacttgattgtaatgataaaagactttttaaaaaagttaagaagaaactcacattagatgaacacctaatatggaataaatctatgacaaacaaaaagattatagatagaaaaaataacaatccaagagatgaggtactaaacacgtctaattttacattagctatgacaaataaagaagaaaataataatgaaaatagccttatggatagggttttgaaaaatagtttatttgcgaatatggatgatgaaggtgattatatttatgtttataatagagaatttatacaagaatattcagaaaaatgtaaaaatccaattaaaaattatgtatatttagatgctatgttttttggtatgagtatgtgttgtcaacaattaaccatgtcttttccaactgttgatgatgcaaaatatgtgtatgatcaactagccgttattgcaccacttttccttgctcttactgcatgtactccctatttaggtgggtttctaactgaaacagatacaagatggagagtaatatctaacagtgttgattgtagaacggaagaagaattatcatatatatgtaaaccaagatattcaggaatatccttatatatatccaatgagttacctttaaaaagaaattactatttttataacgatgtagatgtaatacttgacaaaaatgtgtatgacaaattgaaaaaggaaaacgtggatgaatatttagctagacatatagcatctttatttgtaagagatccaattgttgtttttgaaggttcctatagtgaacgtgacattgctacaattcagaagaaaataatggaattgtcaaacgatgaagataaaattaaaggtatggtagaagggtcatcatcaaatagtttgtcatcaaaagttttgttagacaatgaggataggaataaaaatgatagtagtataaaagaaatgaataaatctaatgataataaccataataataattgccatattgaatataataataaaaaagatataaatatgaataagatatatttaagtgataattttgaatttatagaagattatgaagaaaaggttttatcatctcatcaacattttgaaaattttcaaagtactaattggaatagtgtacgttttaagccacctccaattcttgataatcattttaaaggacctagttcaattggatggagagttgaatttagaactcctgatattcaaattaccgattttgagaattcttgtgttgttacattagttatgttattatctaaatttatattaaaagaaagattaaatttatatattcctatgacattgttagaagaaaatttatttagagcatccaaaagagaagctttaacaaaagaaaaattttatttccgtaaagatctaagttatgataccttgaataatgaatttgaggaaaaaagtatatatgatatattttttaatgaaaccaatggattgtttttcttatgttacaaatatgtggacgaactatttaaagaaggattattaaatcaatcagccaaaaataaaatagatgaatatattgaattcgttaaacaaagatgtagtggaaaaatatgtacaggtgctatgtatttaagaaattttatattaaatcatccagcttatgaaaaaaattcttatatcaatagtaaaattaattatgatatatgtaaattaatagctgatattggaaagggattaatcataccacaagaattattaggtgtttttgtcgatccatataaagaaaggataaaaagtgatataaggcaaattaatgaaagccaatacctgaagtccttggcatataaatatatttcaggagaggattatacgcaatacttgctacttaatgaagtacttaaggatgaccaggattattgtacatgtaccagacgtacaatttatgaggaatctatggataatacagtggagtttgcaaaaaaaatgtacgaactgagtgcataa

SEQ ID NO: 2 - protein, 1063 aa, Plasmodium falciparum
MGFLKIGTPLSWDDVQDVKSLIRLYGILQFVHVYKLNKDRYDENIMFGDEIEYIIIRNDESLKESSALLCASDLIDEMMNLESVIDCQYGSHWTPEYSSFTIEGTPSVPFKLDINSSCFVEDCMRIRRSKLNNVLSAVQGARAITLPCFPNVLLNNSVLMARRITGHESTKKKFDSKGKVEFIENAKIKEKVHNSNNNIHKIINNKNNESKIVNNAFDQNKISSIEMVSYEMDENKSTNFVNSDTVFAKNDEEGEVEEEDENENEQQQQQQQYQSNLQQQNVQPKQRQQMIQYVYDDEIENKNKEKDNTPRSCNDYNNVNDSSNTQDIFISSLKKTDSLFECEVFKPEQTNKYSKSALITDMTISPHARYVTLTQNIRKRRGTKIVSFNPIYKDINTEKMDHWKMSLDCNDKRLFKKVKKKLTLDEHLIWNKSMTNKKIIDRKNNNPRDEVLNTSNFTLAMTNKEENNNENSLMDRVLKNSLFANMDDEGDYIYVYNREFIQEYSEKCKNPIKNYVYLDAMFFGMSMCCQQLTMSFPTVDDAKYVYDQLAVIAPLFLALTACTPYLGGFLTETDTRWRVISNSVDCRTEEELSYICKPRYSGISLYISNELPLKRNYYFYNDVDVILDKNVYDKLKKENVDEYLARHIASLFVRDPIVVFEGSYSERDIATIQKKIMELSNDEDKIKGMVEGSSSNSLSSKVLLDNEDRNKNDSSIKEMNKSNDNNHNNNCHIEYNNKKDINMNKIYLSDNFEFIEDYEEKVLSSHQHFENFQSTNWNSVRFKPPPILDNHFKGPSSIGWRVEFRTPDIQITDFENSCVVTLVMLLSKFILKERLNLYIPMTLLEENLFRASKREALTKEKFYFRKDLSYDTLNNEFEEKSIYDIFFNETNGLFFLCYKYVDELFKEGLLNQSAKNKIDEYIEFVKQRCSGKICTGAMYLRNFILNHPAYEKNSYINSKINYDICKLIADIGKGLIIPQELLGVFVDPYKERIKSDIRQINESQYLKSLAYKYISGEDYTQYLLLNEVLKDDQDYCTCTRRTIYEESMDNTVEFAKKMYELSA

SEQ ID NO: 3 - DNA, 4311 bp, Plasmodium falciparum
atgcagcaagatggtaatatacaagtaaaaatattaaaagatgtaaatccttattattataaaaaagaaaatccatacgacaatttagaatataataaatatgttatgaatgtgaatgatgttgagggaacgaatattattgatgataaaaaaaaggatttaggtaaatcaaaatatgatatttttacgacagattctttgtcaactactacagatgaagtatcttatagttatcaaatcgaaaataaaaatgaagaaaaagaatatttgagatattatgataaacagggaggtataatacgacaagataataataataatgaaaataataataataatatttgtaataatgaccataataataataacatttgtaataatgaaaatatgttaacaacaaaaaaaaatgataatacaataataaatagtaatattaaatatttaaacaataataatatatttaataccaacatggtaccacaaaaaaatcacacacaaatatttaacccctatgataaaagtatgaggaatattcaattgtataataaagcagtaagctttttaaaaaatgatggggacataaattcaaaaaaaaatacccatgataatttaatgttcctaaaaaatatacgaagtaaaagtaataataatcttattgtaaataggaaaataacaaatcatgtgacaaataatgtgataagtggtatgacaaataaagtgataggtggtatggcaagtggtatgacaaataatgtgacaagtagtataacaaataatatgacaagtagtatgacaaataatatggcaagtggtatgacaagtagtatgacaaataatatggcaagtggtatgacaagtagtataacaaataatatgacaagtagtatgacaaataatatggcaagtggtatgacaagtagtataacaaataatatgacaagtagtatgacaaataatatggcaagtagtatgacaagtagtatgacaaataatatgacaagtagtatgacaaataatatgacaagtagcatgacaaataatatgcttaataatatgaatagggttgtaacgaataatattattactaatatgaacagatcagtttcgggaagtaaaagtattaacatgagcaatctgttaatcataaataagatggattatggtaatgacatttaccataacaacaacaacaataataataatagtagtagtggtagcaatattgtcagtggtaaatattttgtgaattctcaaaatagtagcaaaaataatttctttacaaaagtaggagaaagcacaatacgatcaccaacaaacattttagatatttataaacagggaaatatgtatatgcacatcccaaaaaatgcagatttaatgaacaatgtttcttcatatagtatagcacatgaaaattatattaaaagggacaacacaaatgtgactcatgtgttaaataataaccaccttgtaaatataaataatgtggtaaacaacaacaatttgaataataacaacaatttgaataataacaacaatttgaatagtaacaacaatttgaatagtaacaacaatttgaataacaacaataatttaattaataacaataatttaattaacaataattatgtaagaaataaccaagctgtaaataacgctcatacattaaatgctcattttaacaaaagcgataatgtggataacatgagaaaccatattccaaacaatgacaataaaaatattgtaaatatgttaaatttaaaaaatatgaaaagtattaatgatttgtcagttttaataaataaaaataaacctattcatcatgtaataaatgggacagaggttcaacaaaaaagatccttgagtaatgttcaaaaattaaaaacgttgaacacttttccaaatgccaagggaaggtttagtttgatcaataaaatggctagcatgccgaatatgagcacgacgagtagtatgaacatgtcagggttaaacacaagctcgtctgaaggattaaccaacataattaatatgaataacataaacagtgtgaataatataaacagtgtgaataatataaacagtgtgaataatataaacagtgtgaataatttaaacagtgtgaataatataaacagtgtgaataatataaacagtgtgaataatataaacagtgtgaataacataaacagtgtgaataatataaacagtgtgaataatataaacagtgtgaataatttaaacagtgtgaataatataaacagtgtgaataatataaacaatataaattatataaacaatataaattatgtaaatatgaacaagggtttgaaccctataaataatgtaagcaatataagcagcctaaaattgttaaacaataataatgatataaaaaagaaatttaatacatatggaaaaagtgaggcgtccgaaaatttaagtaagaatgtcaaatacataaaatatattcaagaaaatattaaatatttgaataatctggatgataataaaaggaagtattctctcacaagtataaatgatgtgggatgtataaaaaaaaaaaaaaatatgaatgatttatttttaggaaagcatgataatatgttacgtacagatgaaataccaaagataaatttaggaaaaaatatattgaataataataaaataataaattataatgataatgataaaagtaatataataaataatgttataaataagaacatttctacagatttggtgaatgatagagagggtgatatgaataaaatgaatattcataatagagagaaggatgaaaataattatataaatattggggataataaaataaagaaaaatcaaattgatgttgttaataataaggtaatgaaattggataatatggaggatgaagaagctatgaataaattatcattaatatctttatatccaaacaataatcacattattaataatgtgaataatgtgaataatgtgaataatgtgaataatgtaaataatgtgaataatgtaaataatgtgaataatgtaaataatgtgaataatgtgaattatatgaataatatgaataatgtgaataatgtgaataatatgaataatgtgaataatatgaataatgtgaataatgtgaatagtgtgaataatataaaaggaataaataacatgaacaataataataataatataaacatgaatcgaagttataaaatgaacatgaaaaaagtgtccaaaaaagataatggtcaaaatgtggtatcggaaaaacgatttagcgaagaaaaatataattttcttaaaaatttaatacgaaataataagaatatggtaaaattaaaatatctgaataaatttttaggaaaaagaagtggaccatcaataaaaaacaatatgaacgatatgatggttaagatgaataataacatgaaggatattatgcatataaaggatgcaactaatataaacaaaattaataataagttggtaaatttaaatacgaataattgtatttcttataatagttgtaacaaaatgaattatatacataaatgtaaaaagaaaagagttttatgtttagatacgaaacatgggaaaaatgaaataaaacaaaatgagaaattaatttatacaaattacgaaataaaaatgtttttgttaaatacgattaaagcaataggtatagtttttaagaaatggaaatttaaaaatttcggattatatttttggtatcatattaaatgtatagaaaatgaaagagatttaaatttttatattaaaatatttaattttttgtttgaaatcataacagggaaaaatatatattaccaaataaatgacattcataacattgttgcattatttaaagaatttaaaatatatgattgtaagcatgttcttaaaaaaagtattaaagttttaaataaatatgcaaaaaaaaattcaaaggaattctcactttttgaaaataatcaacatgtagtattagacatcaataaacatatgttatttaatgatgatgaaaaaaaattaacaacttgtaatataaaacaaaatgaacaagaacaaattaaaaccaaagttctttatgatcatgataatataaatgtagacacgaaacaaaattatcaaaaaataataacaaataaaaataatcatccaaaggataatttttattcatatctatatgattccttacaaggaaaaaatcatatctttcaacaaccaggcgtacaaaatatgcatatatataatatgtttgcacaatttaatgaattaaattttaatgatatgtttaacttttcaataacctaa

SEQ ID NO: 4 - protein, 1436 aa, Plasmodium falciparum
MQQDGNIQVKILKDVNPYYYKKENPYDNLEYNKYVMNVNDVEGTNIIDDKKKDLGKSKYDIFTTDSLSTTTDEVSYSYQIENKNEEKEYLRYYDKQGGIIRQDNNNNENNNNNICNNDHNNNNICNNENMLTTKKNDNTIINSNIKYLNNNNIFNTNMVPQKNHTQIFNPYDKSMRNIQLYNKAVSFLKNDGDINSKKNTHDNLMFLKNIRSKSNNNLIVNRKITNHVTNNVISGMTNKVIGGMASGMTNNVTSSITNNMTSSMTNNMASGMTSSMTNNMASGMTSSITNNMTSSMTNNMASGMTSSITNNMTSSMTNNMASSMTSSMTNNMTSSMTNNMTSSMTNNMLNNMNRVVTNNIITNMNRSVSGSKSINMSNLLIINKMDYGNDIYHNNNNNNNNSSSGSNIVSGKYFVNSQNSSKNNFFTKVGESTIRSPTNILDIYKQGNMYMHIPKNADLMNNVSSYSIAHENYIKRDNTNVTHVLNNNHLVNINNVVNNNNLNNNNNLNNNNNLNSNNNLNSNNNLNNNNNLINNNNLINNNYVRNNQAVNNAHTLNAHFNKSDNVDNMRNHIPNNDNKNIVNMLNLKNMKSINDLSVLINKNKPIHHVINGTEVQQKRSLSNVQKLKTLNTFPNAKGRFSLINKMASMPNMSTTSSMNMSGLNTSSSEGLTNIINMNNINSVNNINSVNNINSVNNINSVNNLNSVNNINSVNNINSVNNINSVNNINSVNNINSVNNINSVNNLNSVNNINSVNNINNINYINNINYVNMNKGLNPINNVSNISSLKLLNNNNDIKKKFNTYGKSEASENLSKNVKYIKYIQENIKYLNNLDDNKRKYSLTSINDVGCIKKKKNMNDLFLGKHDNMLRTDEIPKINLGKNILNNNKIINYNDNDKSNIINNVINKNISTDLVNDREGDMNKMNIHNREKDENNYINIGDNKIKKNQIDVVNNKVMKLDNMEDEEAMNKLSLISLYPNNNHIINNVNNVNNVNNVNNVNNVNNVNNVNNVNNVNNVNYMNNMNNVNNVNNMNNVNNMNNVNNVNSVNNIKGINNMNNNNNNINMNRSYKMNMKKVSKKDNGQNVVSEKRFSEEKYNFLKNLIRNNKNMVKLKYLNKFLGKRSGPSIKNNMNDMMVKMNNNMKDIMHIKDATNINKINNKLVNLNTNNCISYNSCNKMNYIHKCKKKRVLCLDTKHGKNEIKQNEKLIYTNYEIKMFLLNTIKAIGIVFKKWKFKNFGLYFWYHIKCIENERDLNFYIKIFNFLFEIITGKNIYYQINDIHNIVALFKEFKIYDCKHVLKKSIKVLNKYAKKNSKEFSLFENNQHVVLDINKHMLFNDDEKKLTTCNIKQNEQEQIKTKVLYDHDNINVDTKQNYQKIITNKNNHPKDNFYSYLYDSLQGKNHIFQQPGVQNMHIYNMFAQFNELNFNDMFNFSIT

SEQ ID NO: 5 - DNA, 4548 bp, Plasmodium falciparum
atgttttttatgtggttatataaatataaggtgtacatatatgtcatattttttgtacttgttgaaaatacgatgagtatgaaaaagaatttgatgttcacatgttttaataaaaaaaagtttatatatgtaaagaagaatgtattatttttgaataataaatatataagtaatttggtatataccaaggaagatgatatatataaaattaatgagataagtaatgttataggaagaaatagaaagaaaaagaatataataataaataatgatgaggataatgataatattgatagtaagaataatgaactgggtgataatataatatcatcgaatagatatatgaataatgtattttttacaaataataaaaatacatcactggaagttagaaataataataatgaagatggtggtgatgataacaacaacaataataataataataataataatatattagatgtgtcatataatcatgataaatataatttgtgtgataacgaattacaattatataaaaataaatgtaaaattccactttattggattaaaaaattagataacttaaaaaatatgaatgctataaattgtatagaatatttgaaagatgataatttgttatattttgataattataagaacaaaggattattaaaatttctaaatgatgaaaagaggaaatataataattgtataattttgtcaagggtaggtgatttttatgaaacatatggcctggattctatattcctcattgaatttttaaacataaaaaaaatgaataatagattatcatgtggttttatcaaaagcagtataaataaagctttaaatatattaactaacaataatttaaatgtatgtatatatgaagaaataaatgaaaagtctttaaaaatgaaaaagagatatttatcgcaaattgtaacacctgaatttcctatatatttaaataatatacaatactataataaggatgaagatatactacaaaatggtaacaacaataataataatagtaataatatgaatagttataataacatggataaatgtttagataatggaaatatgaatgcactatccttttttagttcttatgatctagatgattattttgttataaaagaaattgtttgtatatatatagaaagcaaaaatattttttcattaagtaaaattaatttaagcttaaaaactatatctatatatgataatataacatttgatgttttaaatgtatatttgaaaaatacgaattttttgaaggtatatatacatcaacatattaatacatcatttaccaaaaaaatcacagagttattcaaaatagaaaattattatttgtttaataatttcaagtcaagtttttattttcatatgtttatattagacaagctaaaaaaacaaatacacgtaaaggggttattcagattgataaagaataaaaatgttttcaaaattaaatcagctgattgtaagaaggaagagaaaaaaattgattcgaatattagtgattatatgaattatgaggagaataataaaattagcaatagacatataaataatgtaaataataatattgaagataatcaaaatgtagaaataaataaaaatgtggaagataataatattgagaaaattaaaaataaaaacattatagataataattttgaatattctttttcatcttattgtacacctttaaatatatttacgagttataatatgggtatatataaacaaaataatcattatgaaaataaaagtaattttttattttataatattatagatataaataataataattcaaatagtataaatatatcagaatcattagagttttttaaaaatatttttcttttttatccaccttttgaagttacaaaacatataagatatataaatgaatatattaaaaagaatgtgaaagatttaatcataccgaatgtaaaaccatttaagaataatattattatatctcttttatcaaatttaaaagccgatcatcacattttaaaaaaaatattagtaaatatagatgctgtactaaattgtattagaaattatgatttctcacttttagtatcaatatttaatgtattaaatcatcaaaattcttttaaattaaatattataaaattttatgaacttttaatgaatattcaaaaaattatgaaagacaatttggatttaggtttattttctaaattctcttatcagtcagatattcaagcttttaatgattttgttatatatcatgaaaacgatgtacacaatataattaatgaaaaacttataactgaagaaaataaagaattagaaaaatccagaacagatttattgaatacaattatatcaaattattcagaatgtgataaaacaaaaaatgcatataaagatattaatttattaaacaaaataataaaaattgataatgctaatgatataataggtatacgtaaaaatatacaaaaaaaaaaaaacaaaaatgaacaaatttcagatttttttcatccattaaacaaaaaatcagatgttatgaaaaatttatatgtaactcaagatgtacaaaataagattaaaacttatttattctcaatttataaaaaaaaaaaaaaaataaatgaaattattcacaatataaatatacaattgtcttcctcagtgcacatactttcatttgtatctaacttcttgcagataattcaggctctatacaaccataccattaacagtctcaagaaaggatggtccctaccaatatgtaaacacctacatttgtcatatgaaaatatgagcttcaacaatatcgacgataagttagcttatatacaaaaaaaagtgtacgatgacaaagacgaaataaaagagtacacattaacaaagaatgtaaataaaaatgatccttcgaattattttataaatgatcaaaagaatagcaatgaatttgtaaaattatctccatgtgatgaaaagaaaattttagaaaacatagacaaagattcagcagaagaaataaaaaaaatgtataaagaaaaaaattacgttaacgattcaataacatatataataggagccaaaccttataatataataaaacataatttaattaaatatgatttttttttaaaaaagaaaaattttattttattgactggaaaaaatatgagtggaaaaactacattgtcttttacaattttgagtatattatttttgtccaatttgggtatgtatgcaccgtgtgatgaaaacagcattataggaaagtttcgagaattttatagtttgaaaaatgtaaactatcaagagcaaattgaaaatatgtccttatttagggaacaagcttattatatcaattcagttatagaagaaataaaagaaaattattctgttgataaaagaccaacaagagaaaaggaaatttttattgtcctcgatgaaccatgtatagcaaccacacctgttgataatgcaattattataagcgcagtttcagattacctgaaaaattattgtggaattataattacacataactacgatttattaaacaaaatatgccagagcgaaaacatcgtttttaaaagaattagtaaagatattaactacctgaaagaacaagataataaaatagttggtaaattagaagacggtatttgtaaaaacagtgaagccttagaaacatgtagatatacaaatatagacccacatgttttaaatttattaaatgtatatgaaaaaaaatataaatttattcataatttaagtaatacactatataccaaatttttagaatatattcaatatagaaaagatgggaagtgtctcaatgacttttttgatcaatatataaatgatataataaaacaaaagagtgataaacatgaaatacaatataatacacctagtaatatggaaaataattataatagttatagttcaaatgatcaaaagaattatatatcagaaaatcacaagtatgattataattatgatatcgattacataaaagataaagaattaaaaaatataataaattctaataataatatacaagaatttttaaacaattatgataagacaaggatacataatgataatccaactaatcataaaccagatcaatatgataactcattagtttatgatgataaactaaatgttataattaaaaaaattgaagaagcatcaaataagaaggttataaaaataggaatgaatgaagaagtacctatttattataaaaataaaagtattgtatatattttatgtattttttcaaaagatgaaaatgatccatatttttatataggtataagtgataatatttcagaaaggataaaatgtcatacaagaaatctattaaataataaaaatcttttaaaaaatccaaagaaaaataatctattaaattataaatatgattggactaaattctatattttactttttcatgttgataataaaatggttgcatccaaatatgaaaaggacctttcgaatttgttgaagaataattataacatattatctaaataa

SEQ ID NO: 6 - protein, 1515 aa, Plasmodium falciparum
MFFMWLYKYKVYIYVIFFVLVENTMSMKKNLMFTCFNKKKFIYVKKNVLFLNNKYISNLVYTKEDDIYKINEISNVIGRNRKKKNIIINNDEDNDNIDSKNNELGDNIISSNRYMNNVFFTNNKNTSLEVRNNNNEDGGDDNNNNNNNNNNNILDVSYNHDKYNLCDNELQLYKNKCKIPLYWIKKLDNLKNMNAINCIEYLKDDNLLYFDNYKNKGLLKFLNDEKRKYNNCIILSRVGDFYETYGLDSIFLIEFLNIKKMNNRLSCGFIKSSINKALNILTNNNLNVCIYEEINEKSLKMKKRYLSQIVTPEFPIYLNNIQYYNKDEDILQNGNNNNNNSNNMNSYNNMDKCLDNGNMNALSFFSSYDLDDYFVIKEIVCIYIESKNIFSLSKINLSLKTISIYDNITFDVLNVYLKNTNFLKVYIHQHINTSFTKKITELFKIENYYLFNNFKSSFYFHMFILDKLKKQIHVKGLFRLIKNKNVFKIKSADCKKEEKKIDSNISDYMNYEENNKISNRHINNVNNNIEDNQNVEINKNVEDNNIEKIKNKNIIDNNFEYSFSSYCTPLNIFTSYNMGIYKQNNHYENKSNFLFYNIIDINNNNSNSINISESLEFFKNIFLFYPPFEVTKHIRYINEYIKKNVKDLIIPNVKPFKNNIIISLLSNLKADHHILKKILVNIDAVLNCIRNYDFSLLVSIFNVLNHQNSFKLNIIKFYELLMNIQKIMKDNLDLGLFSKFSYQSDIQAFNDFVIYHENDVHNIINEKLITEENKELEKSRTDLLNTIISNYSECDKTKNAYKDINLLNKIIKIDNANDIIGIRKNIQKKKNKNEQISDFFHPLNKKSDVMKNLYVTQDVQNKIKTYLFSIYKKKKKINEIIHNINIQLSSSVHILSFVSNFLQIIQALYNHTINSLKKGWSLPICKHLHLSYENMSFNNIDDKLAYIQKKVYDDKDEIKEYTLTKNVNKNDPSNYFINDQKNSNEFVKLSPCDEKKILENIDKDSAEEIKKMYKEKNYVNDSITYIIGAKPYNIIKHNLIKYDFFLKKKNFILLTGKNMSGKTTLSFTILSILFLSNLGMYAPCDENSIIGKFREFYSLKNVNYQEQIENMSLFREQAYYINSVIEEIKENYSVDKRPTREKEIFIVLDEPCIATTPVDNAIIISAVSDYLKNYCGIIITHNYDLLNKICQSENIVFKRISKDINYLKEQDNKIVGKLEDGICKNSEALETCRYTNIDPHVLNLLNVYEKKYKFIHNLSNTLYTKFLEYIQYRKDGKCLNDFFDQYINDIIKQKSDKHEIQYNTPSNMENNYNSYSSNDQKNYISENHKYDYNYDIDYIKDKELKNIINSNNNIQEFLNNYDKTRIHNDNPTNHKPDQYDNSLVYDDKLNVIIKKIEEASNKKVIKIGMNEEVPIYYKNKSIVYILCIFSKDENDPYFYIGISDNISERIKCHTRNLLNNKNLLKNPKKNNLLNYKYDWTKFYILLFHVDNKMVASKYEKDLSNLLKNNYNILSK

SEQ ID NO: 7 - DNA, 1728 bp, Plasmodium falciparum
atgagcgaagatataaaatttgtagaacgcaacaacaataataatattaataacagcataccgaacaatattataaatagtgtatccattgcgacggataattcaaagttgaacatatcgccaaaggttgataatgtatgtgatgtgaaaaatatttataatataaaaaaagaagatgttataattgaagagtatatggatattaataaaagtagtacaataaatctagatcataataaacaagttaatatatatattgaaaatagcgatcttaataaaaaaatatatacatgtcatacatgtaatatacaaatatataattattccttctttcgttatcattttaaatccgaatggcataaatataatttgaaaagaaaattattaaatctacattcagtaaatgaatatgtttttaatgaaaaattaaaaaatttaaaaaaaaatgaagatcaagaaaatcaaaagaaagacaaaagagaaaatcaagggagccatttaagtcataaaaaacgtaacgaaagtaataaaaaaaaaaaggaaaaaaatatcacgaattttaataatattaataatgatcataatgcaatcaatcaaaataattataataataataatcatgtgaccaaatcgaataatcataccaatgaacataacaatcattcaaatgtttcatccacatcaaataataacaatataaaatacgctacaaaagaaaatgtacttttaacaaaaaatgctaaatatgacaatccagctgtctgtttttttgataatcgtatttttaattccatagaagaaaatataaaacatatgaatgatacttatacattttatattcctgatttaaaatacgtaaccaatgtgaaaaaaatcctattaacaattggaaagaaaatatatgaagaaaatatatgtatctattgttttaaatatgcgaaatgtgttaaatctttacaagcacatatgatttgtaaaagccatacgaagttacataccaattttatggtctatatccaaaaatattatgacttctcaaaaacttatgttgatttattaaataaatatattaataataaacaagataaaaaattactcctctatatgttaaatcacgaacaaaataaagagaaacaattacaaattcatgataataaaaatcaaaatcatcataatgacaaccatttggaaaataacaatgttcttacgaaaaagaaactttctaatgatacagacaataattctgaggactatcctaatgatagttatatattaaaaaaagaaaagaaccaagatacatctttatcaaactcttatgataatcatgataataccagtgatgataatagtagcgacgattataaaataaaagaaacagatctaaataaaaatattgactataataaaatttatcaagtattagaagaatttggatacatcaaacctgaattaaatgaatataacaatttaattctaccagatggttcagaagccatcaatagaaaacttgcttacatatttaaacaaaaactacccttggaaaataaaacaagcttttcttccaaatataatcaaatcgatgttttaaaaaataaaaaagacaaacacttacaacaacgcaaatataaatattatattgatattatgaagaaatataatttaaatctaaatttgaagacaaacaatttgaacaagttttacaaaagtgattctatcttcttcctctaa

SEQ ID NO: 8 - protein, 575 aa, Plasmodium falciparum
MSEDIKFVERNNNNNINNSIPNNIINSVSIATDNSKLNISPKVDNVCDVKNIYNIKKEDVIIEEYMDINKSSTINLDHNKQVNIYIENSDLNKKIYTCHTCNIQIYNYSFFRYHFKSEWHKYNLKRKLLNLHSVNEYVFNEKLKNLKKNEDQENQKKDKRENQGSHLSHKKRNESNKKKKEKNITNFNNINNDHNAINQNNYNNNNHVTKSNNHTNEHNNHSNVSSTSNNNNIKYATKENVLLTKNAKYDNPAVCFFDNRIFNSIEENIKHMNDTYTFYIPDLKYVTNVKKILLTIGKKIYEENICIYCFKYAKCVKSLQAHMICKSHTKLHTNFMVYIQKYYDFSKTYVDLLNKYINNKQDKKLLLYMLNHEQNKEKQLQIHDNKNQNHHNDNHLENNNVLTKKKLSNDTDNNSEDYPNDSYILKKEKNQDTSLSNSYDNHDNTSDDNSSDDYKIKETDLNKNIDYNKIYQVLEEFGYIKPELNEYNNLILPDGSEAINRKLAYIFKQKLPLENKTSFSSKYNQIDVLKNKKDKHLQQRKYKYYIDIMKKYNLNLNLKTNNLNKFYKSDSIFFL

SEQ ID NO: 9 - DNA, 16320 bp, Plasmodium falciparum
atggaacctaaagaaactgataatgtaataaaagatgaggacaatgtgaaaaaggaagaacctatattatctattgaaaaatatttattaaaagagtttggtgatgggaaaacgaataagaaggatgttatgagaaaattgagaaagaggatatataatcataaaaattcagaagagatatacaaaaaattaaaagagattcatgggaatagtggtatatgtacacgtcaatggaaggaaggtagttttgcttttaagtgttataattgtgaaggggatccaacgtgtgctatatgtgcaaaatgtttttttgcatcaaatcataagaatcatatatataggttaacacatacaagtggtggttgttgtgattgtggagatacttcatggaatattaatggttcatgttttgatcatagaggaattaatgaagattgtttgattaacaattctatattaaatattgatataaagaatcgtgtaagagaagatttggaatgtttgataggaacattatttagggatatagtattaaaagatggatattttttatctttagtaagtgctgattatatagagcatgcatttgatttttttaaagatttaggtattacaagttatttatttcggcaagttatctgtgaagtatttacaggtgcaaaaatagattttttagtaaattttcattattgtttttatgtaggtgtacagaaagctttatattctttttatttatctttatttgttcatccatattttaaacaaaggtttgcttttaagttagctaaacattataaattggttgttcgtgttgctgatgatcgaatttataatgataatcatttgaatggtttaagtgttcaggtattaactgttcccgaaatagcatatactttagttataaataatttcttgaatgatttattaaaattaatagaaaatttatgtgtatttaataatgtaacaaattgtgttatgcataaaaatttcttacgatctgatatcgaaattataattcgtatatgtgttgatttgaaatatttgctttatcatcatgaagttataaaaattgtattatttaataaatatgtcattaaaaaaatattaaaaatattatctcttttgcatagaatgaattcacaagtacgatatacaaaatcgcatattatatatgaagatttatctagttcctattccataacgattgaaaattatttacttcgtgtatttgaacccttggctaatttttgtaaaagagaagctaatgcaaattttagaaatttatttttattgtatcaattaacaattagaggtatacataaattggatttgtttccatttaatcgaaaaaaaaaggaggcagaaaattcttttatgaatcgcaaaaaattgaaggaaaaaaaaattacaaaaaagaggaatattaaagaggataattcaacggatgacttgacaggtgatagtgataatagtagtactaataatgtttgtcgctgtgatactagtaattatgataatacgatgtttgatcgtagttgtagtataccagggttaaataatatgaatgatgacgttaataaatctggaggggtatctttaaatgatgataatataaataatgataataataatacaaataataatacaaacaataatacaaacaataataataataatacaaataataatacaaacaataataataataataaaaattgtgagggcaaggccaatgatcaaacgaataagaaaaaaaaattcaaacatcttagatctttacattctccattagttcgattctttatcatgattttaaattttgatgtcattaaaaaatgcctagatgacgtgtactggtataaatatttatatttaagaagggtttatgaaaaaaaaaggatatataaaaatagaaaaaaaagtcctgcatataataccaatgatgataataaaaatgaagtgtgtactaaaaatattccatgtgatgataataaaaatgaaatgtgtactaaaaatattccatgtgatgataataaaaatgaagtgtgtactaaaaatattccatgtgatgataataaaaatgaagtgtgtactaaaaatattccatgtgatgataataaaaatgaaatgtgtactaaaaatattccatgtgatgataataaaaatattccaagagatgataataaatcatataataaaatgtacaataataataaaatgaataaggagttaacatataatgatgaatatataataaatgaatttattagagatttttattctatagaaaagcattcagaagaaataataaatcagcgaaaaatattacaagaaagatatgaaaacgatggtaataatatgaagataacactttttcattttaaaaaattttttacaagtaatgatgaacataagaatgaacatttaggaaaatatatagatgaacatatatatttagaaagtaattattttaaatggattatgaataataattctagttctaaattacgtgaatgtaataataagtatagaattaaatatagagaaaccatacaagaaaagaatataaaaataaaatgtaaaaatatatatatagagaaaaaattaaaaaattcaaaatatgaatttaatgaatttttggatataaaatatgataaagaaaaacataatatatatttacatcctttatatatagatttatatatgagagatatatttgagtttttaaatttatttgatttaaaattattaaaaaatattctttttataaatatacaaatcttaacatttatatatgaaattaaatatggttattgggtaagaaatggtccacaaatgattttccaggttggtgaatatgataattctttattttttcaaaatgatttaataggaatacaatttgctataataatgatgaatgtcttacctttatacgaaaatcaaaaagtttatttagattcacatgtgatcaatctatttcatcaaatatggaatattaaggttcaatacgatgaaccacttaaaaaattaccatggtcaaaaaatgaatacaacgatgtgcaaaatgattatatacataaagctgatgatgaaatatgtataaatgaaaaggtatatgatgaggatactaataaatatatagatacatccccaaatttttcatataatcataatattcagaatcactatatggtagaagaacattctgaggataaaaaaccgtattatatgaataaaataaaatatataaaaaaaaatgatgaattttttgaagaacatatgaaaatgtatgagagcatgcttatatataatagatccaaaaaatcaaatgataataataccttacctgttaataataaaatgggaaattcaaaaggaaaaaatttggatcacgatgatggtgatcatgtcaaattgctttttggaattgacgacaaaaatgtaagcaataataataacacaaataatataaatagtataaatagtataaataatataaataatataaatgtgtgtaataataacaatacatatgtttataataaggtggaatttaaatctatatgtgatcttttgtgtaaatattcatgcaaacaattaaaagaccaagaaaatgaatcaaacccactgttaagagaaaccgaagggaggttaacctcggataatataaatttcaacaaattagataataataatgataatatacaaagtgatttgttagataatgataaaaggtattataataaaggatctgtaaggaaagaatcaatatataatgaagatagaatatgtgaaaaatataaaaagagcaaactagaatggaatgaatatttagaagaatttatgaatatagaaataagaaatccatttattatattatatcaattaatatttaagaattttcgtatgaatttaaatataagaaaaataaatgatatgtatgtagaaatcgaaatacatcatataaagatggcatataaaatatttagtgatatatatacaaataaatctactgtagattctaggaaaattggtcatatattttattttcaatttttttatgatataattatacgtatctttaatgaattatattatttagaatatagtaatataccaagaaaaacatcttatgaaaaatatatagaaagaggtaaatatcatgttaagaaaatattaatacaattattagcatcaaaagattttcaatattttcaactcgaaaatgtatttcctaagcaatttagacaccatccaagtttttatgaacttgttaataaatatggatataaaacacatatgcctagaagtaatgttaatttgataaagttaaataagaattcgtggtatctctatgatgccttttggcccctttcagcattcaaagattttcaaacagctaatgaaaaatgtataaaagaagaaaattcttcctatataggatgttcaagggaagaagacaaagaatatttaaatttttcatttcgcaaagtacaaaatttattattctatacatttaaaaatagttgtctcgtttctatacttttaattgtgtttattattaatgacgaatttcagaggaaaatcgaaaaaaaaaaaaaagaagaattagaaaaggaagaaatgaaaaagcatatgaaagcggatgtaacgggagaagacgactcgttgcttaatcaaaaaggtggtacaacgaataataatacgtgtgatgtaggagttgtcattaatgaggaagcaaaccgatccagtggaatgtcacaaaatgttgtgacttatgagagtggtataaatatgaataatgatgatgtattaggagaagaaaggaataataacgatgatattaattatatggatgataatgatgatgataatgatgataatgatgatgataatgatgataatgatgatgataatgatgatgataataatgatgataataatgataatgacaataatgatgatgacaataatgatgatgacaataatgatgatgacaataatgatgatgacaataatgatgatgacaataatgatgatgacaataatgatgatgacaataatgatgatgacaataatgatgatgacaataatgatgatgacaatgatgataatgatgaagattccaatcttcatggtagttcttctaatatgctaaatattataaacagcggtgataataattcagtaactaattctagtaatataaatacagcacgaaataataatagtacatatataattgtagatcagaatggagataatgaaaccttatttgcagagatattaataaatcgtaatcctaataattctataaatatggaaattgtaaatgtaacggataataatgttggtgatgaaaataataatagaaattatcgtcatttaaatgctgatggattatctgaattaatcagaagtcttataagtgaaaataatattattaataatgtaatagatgaatcttttttacaaaataataatgtaggaggtgataattctattaataatgatgacataagaaatagaggtggatcaatatttgatgataatatatcttttgataataattcatcaagtgatgaattgaatttaatggattctacaaattcaaataatgtcagaatcaatttatacggtagaacaaatggattgtacgatttaaattttattttggatagtaatgaaattatgggtaaccttaatacacataatgtgaataatacaatagatatattgatcaaaattataaaaattttgagtgtcgccatgggttcagcgcatccctttattgagctaaatagtttttattattttaacgcggtgaatttttatggcacagataatgatgatgacagtgaaaaaaatgaggaaattggtaacgaagaaaatgacaaaaaatatattgataaaaaatatattgataaaaaatatattgataataatgaagaaattgaaaaaaaacaccattgtgatcaaaataaaatttatgatgatgttgataggctatcctccgtatcatcaaattcttatgatatattaatgaatcatttggaagaatcatgtatgtatacaagttattcagatgaaacatatgagaagaatggtaatgtttataatatgagggagggatttaatgtggaaaacctttcttatgataaagatatattaaatgaaaaaaaagacatagtagaaatagaaaatgagaaagagaaatatataaaaataaatgatcatactgtgagtagaaattatggttgtgtttccttattaaaagatgaacctaaattttcatcaaccgatggaaataataataatattattaatcgttgtaataataataattattattatgataatatgaaacatgttgatgagaaaggtggtgaaggtgaaggtgaagattcagaagaatgtcaaataaaagaaagttacaagaaaatgtctgaatgtaataataaggaaaatataatttttgattccattaatgtattaagaaaaaacaatataaagagattaaaaaattatatgtgtaaaaataaaaattgttatatatattatgatgataataataataaaaagaagaagaataaaaagaatgttgaaaatcaagaaaaagaattttacgtgttaaataaaatatttgtacataattttataaattgtattaataatataaatgtgaatgaagataagtgctttcaaaaagtgagatctaccattttaaatagattaaaagagatgtattctggaaattatgattgtaaaaataataatagtaataatgaatttatagaattagcaaaaaaaaaacaagaagatttattaaaaagtatgaaagaacaacaatccaaatttagtcattttttagaagaggaatattcatctgaagaaaatgattcgctaccaaatggaggaactgaagattttgaagatgtcgattttgtggatgatgctagtagttatttagatagtaatagtaataataatagtgatggtcatgaagatgataataaaaatcgttgtactgatgtaaaaacaaataaacaagaagaagaattctctatatctaatgttaatgaaaaaaaaaaaaaaaaatatatgaaaggaataacaatttgtgaatatgaaaaaataaaagaaaaaaattgtatatgtgttttatgtaaagaagggatgtctaaaaataatttattagcatatatatgtttttcatcacatactaatttattaaaaaaaattataaaaaaaaataaattttcatttccttgtaaacacccatctatatatacgtgtggtcattttatacatacaaaatgtttacataatacaaggatattaaaatatagaaaattgttcagtgtaaaaaatgaaccaactctttatgaattcacatgtcctttatgtcgttcaatagctaatagttttgtggtgtatataccaaagaggtatatatcggagaatgataaatatagaatttatgattgtaatgaggaggaatttttcttggataactcaaataaaaatttatccgaacttttgaaaatttcgaaatattcagaagagaggaattatggaattaaaaggaagaaggaaagagaagaaaaaaaaaaaagtaaaatgataatgatgagaggaatggaaagcgataatataaacgaaatggtaagcgataatataaacgaaatggcaagcgataatataaacgaaatggtaagcgataatataaacgaaatgacaagcgataatataaacaaaatggcaaaccaaatgaattatgaacaaaatacagatggtattataataaaatcaagtgataatataaacgaaatgacaagcgataatataaacaaaatggcaaaccaaatgaattatgaacaaaatacagatggtattataataaaatcaagtgatataccaaataatgttcaggtagacatatttataaataataatatatcacaaatttatgagtgtgctgagcaaaacatagaattattaaaagacataaagaatggagaatctacaaatatgtgcaacaaagcagataatttgtttgctatacaaaatgataacaattatccttatagaaataaagaaagtgaagaaatatgtgaaggagaagattttttattaataaataaaaagaatatttcttgtaattatttgaataactatgtaacaaacgatacattaagaaatgacaatgtaatgatacataaggatatcttattagatgattattttttacaagatgataataaattttctacatgttctataacattgaatgattatctaatagctcgatattttaatataacaaattgtgattatattaaaaatgataaatgtaagagtaggaaggatatttgttttaatgataataataataattacaataatgatgatgataatgatgatgataatgatgataataatgatgatgataataataatgatggtgacaataattacgatacgggggaagaaagcttatccaccctgtcgtcttgctcatcagaaaatgtatcatccgataatcatatggatgatagtgatatagctgaagaattttattttaaatatacacatgataagaataaaaatataaaaatggcgaacaaaaaaaataagaaaaggaacttaaaggaaaatcataaagaagatttccatatgaataatagtaatactcataatgtgagttcatataattttttcgatgaaaataagaagaatacaatttttaatttaaatttctgtaatcttataaaaaaggatagtttattaaatgatatgttagcatatgaatgttatgaaaaaaataaaaaaataatattaagaaatatttatttaaatgaaaataatatgtatgatgaattatttgaaaaaaagaaaaatgataataatgtgggtacacataatattatatattcacaagaaaataatgatgaccttttaaataataaagatgatataaatattatatataaaaatagcaatatggaaaaacaaaaaagaataagaaggagaaaaaaaggaagaggtaccgaaatatatttttataaaaatacatctaattatgtaaataaagattatacatttacatatagaaattcgaatttttattatcgtacgaaaaatggttttttatcttactatgttagtttaccattatcatttattaaagaaatacaatattttatgataaaaaataaattatataattacccaggaaataatagatataataaattttatttaacgacggaggtagataaggaagaaatcaaaaaagaagaaatggagatgaatatcgatatgaaaatcgacccgtctatgttttgtaattttgaagacaaaataaaaacgaaggaagaatataatactgtattatattatgaaatgaataatgatattataacatatgtaaaatctaattttaattatgaaagcataaatgccgatgaggcggttaaaaagtatgaggtatgtgatttttatacagatggtacttttgatagtgctggtgaaaaattatgtagtgaagaaaagcaagatcatttaataacgagacataaaataaaagagtgttcacatgaaaatgaaagtgagcagaaggaaaaaagattaaaagtaggacatgagcatgaaatggtggatggtataagtaatatgggcgtggctaataataatgataatatatatggtgataatatatatggtgataatatatatggtgataatatatatggtgataatgataatatatatggtgataatatatatgataataataataatagttgtgtagggggtgaagattttatttgtgataacaaatcagatgatattaattttgaatttataaaagatttaaataaaataaattatgaagaaaataaaaaagaaaaaaaagaaatgttagaaatagaaaaattaaataaagagaatataaatggtgataaaaaagatatatataaatttaaatatccatgtaatatagaagaaataaaagatcataatatatcgatgaaaacaagtttatctatggatgtatatgaaggtattgtaagtacaaataaaaatatatatgaaatatacaatgaattaaaaaggaaacaatatttttattccgtgtgcgatataaaatcattaagacaatcaattatattattagatggtatatcggaaatatcatggagaatatttcatcaagaacatacaacattttcatctatattacaccattcggaaaattataaaagattaattgatttcgattataatacaaaaatagatgataacgatgaagatattgatataaaaggtattggtgttaacgatttattaaaaatatatcgtagattagaaatatatcctgattttatatttaataataataacgtgggttttattaatagacatgatttaaaatttataactaaaaaagatctccttttaatgaatagaaaagattatgagagaaataaaaaggaaaggaaaaaaaaaaatactaatttgtatccaacaaattcacaaactaataataatgaaaatgatgataacaataataataacaataataacaataataacaataataacaataataataataacaataataataataataatgatagtcgtggggatgttaataaacctaagaataataattcctttaataataatagtgagacaaaagaaggtaataaaaagaaaaagaagaatcatagtgatgtattaaacataaaatactggagaaatattaatacggctgttgatttttttaaaatatattggattttatataatgagatattaataaatattttttataaaaatataaattatatatcttgtaataatatgatagaaattttagtacgtaatttatttttatacaaatatgaattaaatattttaaaagaagaaaatatgtgtaatctttttaatattcaaacatggaaaaatatgtataaaatatgtttcttttatgtctatccttatcgatttacctttaataaatataaaaaatttttcaataaaattaaaaaaattcactttttaaataatttatcctttattccattatcagtagatgtattaaaattatttatgaatttttttttaaatcaatatttatatactccttcattaattaagcattttatttcaatatcattaatcataatatcttttcaaattatgaatgaaatatttataaaagaaatatcaaagacatatgtaagatttatttttaagacaatacaaaattataacaaaatcaagaaatatattactcgtatatctaaatatatgtattttcaaaaaatatatacaaattatattatcagccattatgaatatgtagactatattgagagggccaatacatttattcaaaccgaagaaacaaaaaaaataagacataatgaaagttcgatttatcataatattgaaatggtaggacataaacaaaatgaacagaaaaggcattctttaaattcttacgacagatttcacatttttctttttgaaaaatatgtaaaaaattctataccaggaggtgaaaatataactttaaaatatgtgaatggtcgatataaattatatgacaatgagcaagaggtagtacgtatgagtgatcttgaacattttgaaaagataaaaaatgtttattcgaaaaaagcaacggatattttaaaaaagaagaatgaaaaaatgaaaaatgataaagaggaaactggtaatgaacaagcaaataattgtaataaaacattagatggtaataaaacattagatggtaataaaatattagatggtaataaaacattagatggtaataaaatattagatggtaataaaatattagatgataataaattattagatgataataaattattagatggtaataaaacattagatggtaataaaatattagatgataataaaatattagatagtaataataataataataataataataataataatggcgaaaacaaaagttggaacttccagaatgtatcatcttacaacgatttaataaaatccgtgcttgataaaaaaaatttcttttttattatagatattgttaacttatttaaaaatatacaaacattgtcgtatttatttgatgaagaaacaataaggtacgtacacatgattattatgaatagtaaaatattatcatatgatttaaaagaaatagaaagaaaaaaaaacttgcaaaaaaagatttatccaaattttacttcttatattacaaaacagaagaaggcaaataaattaaaatgttataattatgatttattacatattgaaaagaaatggatattatatcttatatataaaaccatattaaaatattatgatatgcttatatttaagaagaaagttcaaaaacttatgcttttgatgtgtgaaattaatgatgaatatataaaatatatatattttaatggttatattcctataaatatatatttaagtacaaacttaataaaatacaatgaattctttacaaattattattcttatatatataacaaaaatgttaatgataaatggggtgatttccatgtcttatatttccaaaatgaagaaaataatataaaaaaagaaaacaaaaaaaattattattattattattattattattattatacactttttaaaaacaaacatgttttaaaaagagattataatcatattgtaagtaataatatacaacccattaataaaatgaatgaacccataacatctaatgaatgtacctctccaaatatgtcttatcatatagaatcaaatgaaatatttaaaaatgaagatgatcataatcttaatatatataatgaacatattatgtataattcgcacaaagatacaaatttgttatcttcctctaaccatatgcaacacgtacaaaaaaataccctcaccatgaatcttgatcattccaataatctaataataaatgataaccataaaagagataaagaacataatataaatacgaaacattggaataagaacataataaatagtaattattttaatgtatataataatgattctagcccaaaggagcaaatccatttagaggaaggtgggggtggtttaatagatgttgatgatgataaaaaggataatgttattaatagtgataatcattttaaggaaacgacatataatcatatagcatatcataaggaccaagaattatccacagaattaaatttatttaaatataaattatataatatatccagtgaagaaattagtaatttatatttaatggaagattgtaataatgaaaaaggatttttttcatgtgttcataaaaatgaagattttgaatataagaatattaacattttaaatatattaaaatatcaatttgaactagttccatatattaatcatttatattatctttataatatctatccattattatttaaattgaaagagataaaaaatattcatgatatgaaagaaaaacaaattaatttatgtacagaccaatttttattatccttagtagataaagatatttatgattgttatgatgatgtaaatttttctgatgctagtttttatagtgatcaaactattcatgtttctgaaaaagaatgtgaacataaaaatcataatagtaataaatatgattgtaataattatcatccttttaatgtatctcatttatcttatccatataaagatcaaaatggtgacgaagaagatacattgcaaattaattcttcattaaatattcttgaaaatgttgtcgatcttgatgaactcataaaagatttgaaaaaaacaaaaaagagcaaaaaaaaaactagtaaaaataaatatgctgataaattttttgtctcattttttaatacagcattgaaaagagacgaagataaaggaaaaacaaattatgtacattatagaaaattacgaaatgctaaaaataatataaaattaaaaaatttattcttatcacaccaacaaaatgatactatttatgataatataaatggtaatatttgtgataatttatacggtaatgtcaatacctatcaaaactcagcttctcttatatttgtagatccacataatttaacaaatataaatatttccaacgaattaaataataatatcaatataaattgttcgaaaaataaaaaaaaaaaaaaaccatcatcaaatgatcaaaataatactgaaaatgaagacatgcaaaatagctcatctgataatccatatgatgattcaaattttatatcttatcatgaaagtatagattctacaagtagtacagataaatatcataaaagaaaaatgacccctatggaaagtatgtttttaaaatatacattaaatacatcagaagatgcattatccaataaatataatgtaactagcaaaaataaaaataaaaaagaatatttaagttttcttaaatataaagatgcaaacaaaattcaacgttatcatatgttattaagaaaaaatggtcttggaagattgtttttttataatttaagaaaaatgtataattatgtatataatctatatgatttcatacctctttatcttatacaaaatatattaatacattattatgatatatatcaacatgtaaaccaatattattatcatgatgataaagaatatcccactttttttacacaacaaaatgaagatgatgaatatgaatataccaagttttctaaaaatttctttaatactaataaatggaaaaaaatgtattcgaaatatgaagacaaactaaataacgaaacatatccggaaccaccaaaaaaatatatttcaaataaacagcgacataaagaaaatattctaatataccaaaatttgcaaaatgatcatatgaataatcattataatattgctaataatgatatagaaaataaaaatcaaaccaattcatcatacctttttaatgttcaccatcaaaattgcccttctctatcatcaaacaatcttgtaaatattaatagtactttaatcaatgaccaccattttgtacaaacaaataatgatcatatgaacatcatacaacatatggagaacattccagaaatgtcggaatgtaatttaaaaactgaccaaaataataacatctttaattttccacaagataaaataaatcctgatacaatgaagaaaaatgaaaaaatggaattctcggtaaataaaaaaataaaaacaaaccataacacaactggatataataaaagaaataatgataggtataattattctagtactcctaatttttttggaaaagatgaatatgataacacatcatatgaggattatataaaaaaaaaaaaaaaaaacttctcttcaacaagtagaagaaaacgaaataataatataaatatgaaagaattttttgcaaatggacgttatgataaattattaagtataaagaaaatatttatgatattctataattatttgaggaagtgtcattttatcgataaaaaaaattcttgtaagaatttatataaatcatttttaaaaaaatatttaaaatcagctaatgtatatttacaatttatagcttatattatattctccatatatgattataattcattagcaaaaaaatatttagattatatacacttatatagtgatattagtaaatataatatattccttcatatattaaatatcgacgaagactatgataaaatatatatatatcaaacattacaattaatatatcatccatatttttatctaatgtataaattatataaatatctaaaaatagatgcctccccagtattattacatgatttttatgaaaactgggaagaatttacaaaatccccatctttatttcaacctagcaaaaattatttcacattaattaaaaaacatttcaaaagaaaatgtgtaagttgtaataagtctccaaaaaaaatacttatctgtctctattgtggttcaactgtttgtctgcatgaaggtgaccatgtgtccggacccttatcacaaactataagtaaatgtgtgtaccatacgaccatctgtggaggagagcaatgtttatacttatgtttaaatacatcatcggtgttgtttacgagtgaaaaccgattcgattttatgagtggaccttatgtcgacaaaaatggagatgtggactatcaattaaagagaggaaaaaatttatacctttcttcttataagttgaacaaactttttgacgttataattaattcagcagttgatgttgaaatatataagcatacgttgaaatcggaataa

SEQ ID NO: 10 - protein, 5439 aa, Plasmodium falciparum
MEPKETDNVIKDEDNVKKEEPILSIEKYLLKEFGDGKTNKKDVMRKLRKRIYNHKNSEEIYKKLKEIHGNSGICTRQWKEGSFAFKCYNCEGDPTCAICAKCFFASNHKNHIYRLTHTSGGCCDCGDTSWNINGSCFDHRGINEDCLINNSILNIDIKNRVREDLECLIGTLFRDIVLKDGYFLSLVSADYIEHAFDFFKDLGITSYLFRQVICEVFTGAKIDFLVNFHYCFYVGVQKALYSFYLSLFVHPYFKQRFAFKLAKHYKLVVRVADDRIYNDNHLNGLSVQVLTVPEIAYTLVINNFLNDLLKLIENLCVFNNVTNCVMHKNFLRSDIEIIIRICVDLKYLLYHHEVIKIVLFNKYVIKKILKILSLLHRMNSQVRYTKSHIIYEDLSSSYSITIENYLLRVFEPLANFCKREANANFRNLFLLYQLTIRGIHKLDLFPFNRKKKEAENSFMNRKKLKEKKITKKRNIKEDNSTDDLTGDSDNSSTNNVCRCDTSNYDNTMFDRSCSIPGLNNMNDDVNKSGGVSLNDDNINNDNNNTNNNTNNNTNNNNNNTNNNTNNNNNNKNCEGKANDQTNKKKKFKHLRSLHSPLVRFFIMILNFDVIKKCLDDVYWYKYLYLRRVYEKKRIYKNRKKSPAYNTNDDNKNEVCTKNIPCDDNKNEMCTKNIPCDDNKNEVCTKNIPCDDNKNEVCTKNIPCDDNKNEMCTKNIPCDDNKNIPRDDNKSYNKMYNNNKMNKELTYNDEYIINEFIRDFYSIEKHSEEIINQRKILQERYENDGNNMKITLFHFKKFFTSNDEHKNEHLGKYIDEHIYLESNYFKWIMNNNSSSKLRECNNKYRIKYRETIQEKNIKIKCKNIYIEKKLKNSKYEFNEFLDIKYDKEKHNIYLHPLYIDLYMRDIFEFLNLFDLKLLKNILFINIQILTFIYEIKYGYWVRNGPQMIFQVGEYDNSLFFQNDLIGIQFAIIMMNVLPLYENQKVYLDSHVINLFHQIWNIKVQYDEPLKKLPWSKNEYNDVQNDYIHKADDEICINEKVYDEDTNKYIDTSPNFSYNHNIQNHYMVEEHSEDKKPYYMNKIKYIKKNDEFFEEHMKMYESMLIYNRSKKSNDNNTLPVNNKMGNSKGKNLDHDDGDHVKLLFGIDDKNVSNNNNTNNINSINSINNINNINVCNNNNTYVYNKVEFKSICDLLCKYSCKQLKDQENESNPLLRETEGRLTSDNINFNKLDNNNDNIQSDLLDNDKRYYNKGSVRKESIYNEDRICEKYKKSKLEWNEYLEEFMNIEIRNPFIILYQLIFKNFRMNLNIRKINDMYVEIEIHHIKMAYKIFSDIYTNKSTVDSRKIGHIFYFQFFYDIIIRIFNELYYLEYSNIPRKTSYEKYIERGKYHVKKILIQLLASKDFQYFQLENVFPKQFRHHPSFYELVNKYGYKTHMPRSNVNLIKLNKNSWYLYDAFWPLSAFKDFQTANEKCIKEENSSYIGCSREEDKEYLNFSFRKVQNLLFYTFKNSCLVSILLIVFIINDEFQRKIEKKKKEELEKEEMKKHMKADVTGEDDSLLNQKGGTTNNNTCDVGVVINEEANRSSGMSQNVVTYESGINMNNDDVLGEERNNNDDINYMDDNDDDNDDNDDDNDDNDDDNDDDNNDDNNDNDNNDDDNNDDDNNDDDNNDDDNNDDDNNDDDNNDDDNNDDDNNDDDNNDDDNDDNDEDSNLHGSSSNMLNIINSGDNNSVTNSSNINTARNNNSTYIIVDQNGDNETLFAEILINRNPNNSINMEIVNVTDNNVGDENNNRNYRHLNADGLSELIRSLISENNIINNVIDESFLQNNNVGGDNSINNDDIRNRGGSIFDDNISFDNNSSSDELNLMDSTNSNNVRINLYGRTNGLYDLNFILDSNEIMGNLNTHNVNNTIDILIKIIKILSVAMGSAHPFIELNSFYYFNAVNFYGTDNDDDSEKNEEIGNEENDKKYIDKKYIDKKYIDNNEEIEKKHHCDQNKIYDDVDRLSSVSSNSYDILMNHLEESCMYTSYSDETYEKNGNVYNMREGFNVENLSYDKDILNEKKDIVEIENEKEKYIKINDHTVSRNYGCVSLLKDEPKFSSTDGNNNNIINRCNNNNYYYDNMKHVDEKGGEGEGEDSEECQIKESYKKMSECNNKENIIFDSINVLRKNNIKRLKNYMCKNKNCYIYYDDNNNKKKKNKKNVENQEKEFYVLNKIFVHNFINCINNINVNEDKCFQKVRSTILNRLKEMYSGNYDCKNNNSNNEFIELAKKKQEDLLKSMKEQQSKFSHFLEEEYSSEENDSLPNGGTEDFEDVDFVDDASSYLDSNSNNNSDGHEDDNKNRCTDVKTNKQEEEFSISNVNEKKKKKYMKGITICEYEKIKEKNCICVLCKEGMSKNNLLAYICFSSHTNLLKKIIKKNKFSFPCKHPSIYTCGHFIHTKCLHNTRILKYRKLFSVKNEPTLYEFTCPLCRSIANSFVVYIPKRYISENDKYRIYDCNEEEFFLDNSNKNLSELLKISKYSEERNYGIKRKKEREEKKKSKMIMMRGMESDNINEMVSDNINEMASDNINEMVSDNINEMTSDNINKMANQMNYEQNTDGIIIKSSDNINEMTSDNINKMANQMNYEQNTDGIIIKSSDIPNNVQVDIFINNNISQIYECAEQNIELLKDIKNGESTNMCNKADNLFAIQNDNNYPYRNKESEEICEGEDFLLINKKNISCNYLNNYVTNDTLRNDNVMIHKDILLDDYFLQDDNKFSTCSITLNDYLIARYFNITNCDYIKNDKCKSRKDICFNDNNNNYNNDDDNDDDNDDNNDDDNNNDGDNNYDTGEESLSTLSSCSSENVSSDNHMDDSDIAEEFYFKYTHDKNKNIKMANKKNKKRNLKENHKEDFHMNNSNTHNVSSYNFFDENKKNTIFNLNFCNLIKKDSLLNDMLAYECYEKNKKIILRNIYLNENNMYDELFEKKKNDNNVGTHNIIYSQENNDDLLNNKDDINIIYKNSNMEKQKRIRRRKKGRGTEIYFYKNTSNYVNKDYTFTYRNSNFYYRTKNGFLSYYVSLPLSFIKEIQYFMIKNKLYNYPGNNRYNKFYLTTEVDKEEIKKEEMEMNIDMKIDPSMFCNFEDKIKTKEEYNTVLYYEMNNDIITYVKSNFNYESINADEAVKKYEVCDFYTDGTFDSAGEKLCSEEKQDHLITRHKIKECSHENESEQKEKRLKVGHEHEMVDGISNMGVANNNDNIYGDNIYGDNIYGDNIYGDNDNIYGDNIYDNNNNSCVGGEDFICDNKSDDINFEFIKDLNKINYEENKKEKKEMLEIEKLNKENINGDKKDIYKFKYPCNIEEIKDHNISMKTSLSMDVYEGIVSTNKNIYEIYNELKRKQYFYSVCDIKSLRQSIILLDGISEISWRIFHQEHTTFSSILHHSENYKRLIDFDYNTKIDDNDEDIDIKGIGVNDLLKIYRRLEIYPDFIFNNNNVGFINRHDLKFITKKDLLLMNRKDYERNKKERKKKNTNLYPTNSQTNNNENDDNNNNNNNNNNNNNNNNNNNNNNNNNDSRGDVNKPKNNNSFNNNSETKEGNKKKKKNHSDVLNIKYWRNINTAVDFFKIYWILYNEILINIFYKNINYISCNNMIEILVRNLFLYKYELNILKEENMCNLFNIQTWKNMYKICFFYVYPYRFTFNKYKKFFNKIKKIHFLNNLSFIPLSVDVLKLFMNFFLNQYLYTPSLIKHFISISLIIISFQIMNEIFIKEISKTYVRFIFKTIQNYNKIKKYITRISKYMYFQKIYTNYIISHYEYVDYIERANTFIQTEETKKIRHNESSIYHNIEMVGHKQNEQKRHSLNSYDRFHIFLFEKYVKNSIPGGENITLKYVNGRYKLYDNEQEVVRMSDLEHFEKIKNVYSKKATDILKKKNEKMKNDKEETGNEQANNCNKTLDGNKTLDGNKILDGNKTLDGNKILDGNKILDDNKLLDDNKLLDGNKTLDGNKILDDNKILDSNNNNNNNNNNNGENKSWNFQNVSSYNDLIKSVLDKKNFFFIIDIVNLFKNIQTLSYLFDEETIRYVHMIIMNSKILSYDLKEIERKKNLQKKIYPNFTSYITKQKKANKLKCYNYDLLHIEKKWILYLIYKTILKYYDMLIFKKKVQKLMLLMCEINDEYIKYIYFNGYIPINIYLSTNLIKYNEFFTNYYSYIYNKNVNDKWGDFHVLYFQNEENNIKKENKKNYYYYYYYYYYTLFKNKHVLKRDYNHIVSNNIQPINKMNEPITSNECTSPNMSYHIESNEIFKNEDDHNLNIYNEHIMYNSHKDTNLLSSSNHMQHVQKNTLTMNLDHSNNLIINDNHKRDKEHNINTKHWNKNIINSNYFNVYNNDSSPKEQIHLEEGGGGLIDVDDDKKDNVINSDNHFKETTYNHIAYHKDQELSTELNLFKYKLYNISSEEISNLYLMEDCNNEKGFFSCVHKNEDFEYKNINILNILKYQFELVPYINHLYYLYNIYPLLFKLKEIKNIHDMKEKQINLCTDQFLLSLVDKDIYDCYDDVNFSDASFYSDQTIHVSEKECEHKNHNSNKYDCNNYHPFNVSHLSYPYKDQNGDEEDTLQINSSLNILENVVDLDELIKDLKKTKKSKKKTSKNKYADKFFVSFFNTALKRDEDKGKTNYVHYRKLRNAKNNIKLKNLFLSHQQNDTIYDNINGNICDNLYGNVNTYQNSASLIFVDPHNLTNINISNELNNNININCSKNKKKKKPSSNDQNNTENEDMQNSSSDNPYDDSNFISYHESIDSTSSTDKYHKRKMTPMESMFLKYTLNTSEDALSNKYNVTSKNKNKKEYLSFLKYKDANKIQRYHMLLRKNGLGRLFFYNLRKMYNYVYNLYDFIPLYLIQNILIHYYDIYQHVNQYYYHDDKEYPTFFTQQNEDDEYEYTKFSKNFFNTNKWKKMYSKYEDKLNNETYPEPPKKYISNKQRHKENILIYQNLQNDHMNNHYNIANNDIENKNQTNSSYLFNVHHQNCPSLSSNNLVNINSTLINDHHFVQTNNDHMNIIQHMENIPEMSECNLKTDQNNNIFNFPQDKINPDTMKKNEKMEFSVNKKIKTNHNTTGYNKRNNDRYNYSSTPNFFGKDEYDNTSYEDYIKKKKKNFSSTSRRKRNNNINMKEFFANGRYDKLLSIKKIFMIFYNYLRKCHFIDKKNSCKNLYKSFLKKYLKSANVYLQFIAYIIFSIYDYNSLAKKYLDYIHLYSDISKYNIFLHILNIDEDYDKIYIYQTLQLIYHPYFYLMYKLYKYLKIDASPVLLHDFYENWEEFTKSPSLFQPSKNYFTLIKKHFKRKCVSCNKSPKKILICLYCGSTVCLHEGDHVSGPLSQTISKCVYHTTICGGEQCLYLCLNTSSVLFTSENRFDFMSGPYVDKNGDVDYQLKRGKNLYLSSYKLNKLFDVIINSAVDVEIYKHTLKSE

SEQ ID NO: 11 - DNA, 20805 bp, Plasmodium falciparum
atgataaaggcattatacaaaagtattgtaaattttttattgtcatccttttttgaaaacattgaagaaaaacaattacaaacatcattaatacgaggaaaagttcatttgcaaaatgtaaaaataaaaaaatttttttgtgattttatatatttaccttatactatcaaatatggttatattcgttccttggacttacaaataccactcttgtatttgtttcaaaaagcttctttaaaagtaagcgacgttgtaatagttttgaaggaaaaacatttcagcgaatataacatagaagaagaaataaatggaataaaaggagggaaaaagaataatttaaaacttgaagattataattataatagtaatgatgtgaatcagaaaattaataaaggcttaaattatttattttatgaattatataataatatgtctattgatattgaaaatgtagaaattatattagaaagttctgaaaagactactaatgttattggattgtttgtaaaaaaaataagtagtgttaaaactcataattgtacaaataaaataataaaagatttttcttttgtggatgctattttttatatgaatgatgaaaaagcgaaatatgcaattaataaaattataaaaaaagaagaaaagaaaaagaaaaataaaagaaatattaatgaagaagatatatataataaaattaaatatatttgtaataatttacataaaaaaaaatatataatttcagaaataccatccattgttttaagtacaagtatgtatgttagtaatagtactgattattattatcataattcaaaatttctttttaaaaaaaatagctattttaatattacatgtacacattgtgataaatatctttttcaatgtaaagaagtgaaaaaagataaatcgatatttcaaaatatattcataaagaaagaaaaaattcaacaaagaaataaacagctctatagtgaaattaattgtaaatgtatgaaaaataataaaaatattttccagaaagatcaaaatacaaattgtacgtataattcagatcatgtacctgagaactctcttaagggtactaatgaaatgaataaaaatattccccctgatcttgacagtataaatgtgggacaccccaagattgatgatgataatgaaaaaaataaccatgaaaataatagtcataatgataatcataataatagtcataatgataatcataataatagtcataatgataatcataataatagtcataatgataatcataatgataatcataataataatcataatgataatcacaatcttaaacataaacgtaattataatcatcgtaatggtggtgtcggacaaaataatactggtgataacaaccttttaaataatacatttaataaacataacgaagaaagaaccgtacaagagaaagatgaaaaaaaaagtgaagattgcattgattgtaattgtaaaaaaaatattagtgaagatcttgataattgtttatattgtaggattaataataaaaatcaatcgtatattgaaaaatttcatatgttagaagaaaatataaatttaaaagaaaatgaatatatgacctttgaattgaatgtagataaaatagatttaatattatcattcaaacaattctattatatcttagatattgtaaattattattttatatatagttgtcttgttaatggtttgtgtatagaagaatggttaaatatcccagaaattaatgatatattaatttataaaagagaattaataaaaaaaaagaaaaaagaaaaatttgataaagattttatagataaatttgaatatacacatagctttcaaattatttcaaatataaaaaaacatgtcgaagaatattctttagacaataataaaaggaaaaaaagtataagaggaacaggcgaagatttatcaacacttctgaatagtaatcataacaatgaatataattataaaaatgaacataatcgtcacaatgaacataatcatcacaatgaacatgataataataataataaggtgacaaaatcacaatccgcgtcgtctcatttgtcaaacgtatcaacatggaataaacctttttttgtatataataaaaaaatttcagtaaattgttcatttaacattttaattaaaaaattaaatttttgtttatgtagtggggataaaataaataaaatcatacaaattaatacggatgattttaattttaatgttaaatcttatattaatgctgattttgcatattccttattgttaaaagatattagtgttttctttatacataaagataaaaaatatcctttgtttgaattatttaatgttaatgaacataataaaaaagaagataagaaaaaagagaatatgaaagtaaataaaagaaaaagtaaaacttatatattcaatacacacttatgtaatgatgcgatgacttcttttaaaagcgtttcatctataaaaaatgttccaggtaatatgaataatattacagataatatgaaaaatgataattataataatatatataagaataatgaaaaaaatgtggaaaatggaaagaaatgtagtaaatatgttgagtctagaaatttagtggaaataaataatagacataatgaatattcaaaagaaaagaaaaatataacaaatataaagaatgacaatattaataataatgaaaataataattatgataataatattaataataaagaagaatatgcaatatcattattaacatttactaaatatgaaactacacaagctaaaacatttataaaatttaataaaaatattcttataacattaagtgttaaagaaatttataatattttaaatatgaactgtgattataaaccagtcgatttagaaaaaaaattgaaatcttataaaattttattttattattatcttctaggaaaaaaatattgtaaagaattatatatggcatcagataaaaattttgaggatatgaatatacattttatgcataatatttattttaatataataattaataaaaaatataatttattatttaaaatgaaaaagggacttgtaaattctttcttctttacaaaaatgtatttacattgtgatttgaagaaactaactatgataacagaccataatgatatgcaacaaaatatggataacaaattagttgatcaatatactgaacaaatgaaagaaaactcttcatatcagaatagtcaaagttgtagtaatacaagtagtgtgggctttacaaatgaggacccaacgaaaagaagaaataaagaaaaaaataatctaaatataaatataaatttaaatttaagtacgaatgacgatgtaataattaataaaaatgaagaaaaagaaaatgaaaataaagaaagtaataggacagagcatataaaacgtgataattctatacattcgaatgataattgtagtataggtactcatagtgagctttttaaaaattcggaatataattctatgattaataataataataataataactcttttataaataatgataatacaagtattgataataaggtgtcaatgcaatgtagaaagtattatcaggagtttttaaaaatgaataatttagaagatattaaaacaattagaaaaatagaaaaaagggcaaaccaaaataacacaagcaataataatactataaataatatacacaatataaataatgtacacaatgtaaataatatacacaatgtaaataatatacacaatgtaaataatatacacaatgtaaataatatacacaatgtaaataatatacacaatgtaaataatgtacacaatataaataataattattatgatcatatttatagtcataacaatatccatattaataatcatgcgattatccacaataacagccattataataataaaaaaacaaacattattctgaacaacaacaaatatgatgaatataatgataaacacagttttcatagcgaaaatacaaattcttatagtaattcaaataaggatgattatttaaatgaagatttaaatttatataaagatcatatgtatatacaaaattgtataacggaaaaagaagataatataattactacaatttatcagaaaagaacaaattttgaactttctctttttattcttaaaaataaaaataatgaaaagatacaaaatatattatctcataaaaataaaataaataagaaatatatattaaaaccattaaaaatatatattgatgaaattacatataattttaaaaattcgagtgataagaaaataaccttttttcatactaataattataaaaactatctaaattttacacttgatgataaaattatattcaaacttattttcttttattatcattataaagattatgttgatcatatttttgaaaagtttgaaagcaaagatgaatccaactatttaaatttaaatacaatagatgtacgtagttataaaactttacaaattttattagataatgctgttcataataagaatgatcactggttcaatgaacagaaggatgttcatgataaagatgagcagaataaaggaacaatatattatgaacaaaatgaacatgatatcaaaattgatgataataatgaggaggagaataacgaccacacagataataataataaaaacaataataataataataataacaataataataaaaacaataataataataacaataataataaaaacaatatggtggatggtcaaatcgaatgtaatgaaaatgttacagaaaaagagataccaagtaatgtacccaattcaaataacttaacaaatgaaagttcaaatgataatcataataaaacaactattgaacataataataatttttgtgaagaacagaacaaaaatgatttaataaaaacatcctttaatattactcattgtgaagaagaaaatgcaaataaaaataaatacacggaggaagataaaaaggaaataaaaggaaatgataaaaaaaatgttgaaatgtgtagaaaagatacattagattatgtaaaagaagatataaataaatataagatgtatattaatgaaaataataataaaaaagaagaagaatattcacataataataataatcatcatcatcattaccatcataataatatgttgaaagatgatacatcaaattataaccatgtacaatatttccatggagaaaaaaaagaaataatatgttttataaataaaagtaaaatacattttaataattataaaaaaagtaaaagaatgatatcgatacatttatcagatgtcctaatgtatttatttagtgataataatattacaaactttttatttaatttaaaaaaaattaatatattaaattgtttatctcatgaagatagttataatagtttcttttcatatatacaacataaaaaattttctacacataaaataagtaaaaaaggatcaaaattaagtgataaaagaaagagttcaaatgttaatggaatttatttttataatagtgtttttaaattaattcaaaacggtacctttcttttaaaatattcatcaaagaataatatttcatgcttatcttccatacatctaaacccaaatcataatcattatatagaaaataataattcaaaagaaaaaaattattttctaaacaacaataataataataataataaaatggaaatagaagaaactactgaatttagatattttaatacaaataattttgaacaactaaataatacatcaggaaataaatctattgatggatccaacgtgaaaattaataatagtcttgattttgttcataaaaattattataataatttgaataatgactattttaattttaatgtacctcaggattctaataaacgaaaggatgccacaagttctccaagtaatgttagtaataaaagtggggaaatcaaaagtagtcacaagaaggaacaaaggaaagataatcatatgaatgaaaatattagaggtagtcatagaagttatagtactcatcaaagttatagaacccatcaaagttataaacgtcatgctaataatagtaatatacgatgtagtagcagcccaagcgaaagaacacacatctccaaaaaagatgaaataaaattcaataaagaaaacattatgacattgttaaatgattgtacaaataatgaaggagaaaatcatcatgttaaaataacgaacaaacaaatcaaaagaagtaaaagtaaagaacaatttgaagatataataaatagtaatacaaaaaaaacaaatgatatagaacatatttgggatgaacaaaataatcaaaacaataaagaaaatgataatgttgtaaatagagttgagaaaaaaagtattattacggaaaattatataccttataaaagttgtatagaacaaattgatgatattgattataataaagaatcgttacaacatgaaaaaaacatagatggaaaaacaaatattatatatcataataataataataataatgatcatataaatatgaatactactacttgtattcctataaatgaaaagaactttgttatacaaagaaataaaaaaatttctcattactataatgcaaaagaatataatgattcaaataaaaggagaagaaataattatatattaactggagaggtaaataatataaaaggttataataaagatgatatgcattcatcacatgttaataatatgaataattcattatgctcatcagcttatcataatatgaaatatgaaaaatatgtagatattgagaaatatagaaatgatgacgaattttatgaagctgaagatgatgaagatgaagaaaatgatatagataatcaagaagaagaatatattgatatgaaaaaaaaagaaaatgaaaatattagtagtattgaatttcatatgattaatagtgaatttattgtagattatttatattttatatatttatttaaatggattaataaattatatagaaaatatgaaaaaattaaacaattgtcagattttgcatattcaaataataatagtacagatgatgaagaaagtaatataaatgtatcaaaatgtaattatattcttttcttacaaaataataaaatttatgtaccaatatataattattcaatatcacaatataagtattataatagtttaaagggaacctcttatgtatccttattacctgtattagagttacatttctcatgttcctacaaatctatgaacgaaaacgatgaaaatgtaaagtcgataaacgtgcgaaatttgggaagcgctcttgtcattccaagtattaacatttacaaacataaaaaaaacaagaaaagcaatatatgtgtaataacgtttaataggaaggataagaataatgaaagtatcattaacgatttaagatttcaaataaatatgagaagaaattataattatgaaattatagaaaatgaagatgataatagtagtagttgtaataatatggagattccatattatgaacctaaatatacatcattaaatacatattgcacggttatatctaaagagcagatgtattcagaaaagaacaagaataaaaataataatattaacaacaataataatgataataatataattatgtatgataataatatgtataattatcatggttaccatactaaaacaggatcatatccaaaaaagattattagtttccattgtgatcctataattttaaatttttcaaaagatatattaaaaaatgtacttatattttataatacattttgttattttataaataattgtagtaaaaacgatgatacaggtaatgatagtaatatgattagagatatgttatattatttatacaaccaaagtagtgatatattatttgaatattttcttgatgatatacgtttaaattgttatgatggtaatattaatcgaaatgtaccattgatagtagttagtttgtttaatttaaaattctttttacaaaaggatataataagtatatataattttttgaatttttatttaaatatagatatatatgatagttataaaatattatatgatacgttattagaaaagatggaaatatatttaacttttgaaaataatagaaataaattgaatatattaaatttaacattagaaacatcttatattaatattttatatacaaataaaagtaaaaatatattaataaatttccttgagccaatattaaataaaaatttttattatttcagttcatcatattataataatttggatattacaaaaaataaaagaagaaaacgaagtatttatcatcatcataatcataattatcatcatgaatgttatgaaaataatattttaattaaaaatacaaaaggaaaatcattagttacacatataacatctaaaatatttaattatacaggtttatcaataaatgtaagatttaaacaatcattacgaaataaaatacaaaacaatagtttaaataataagaataaaaataaatatttattttatgaattacaaaataatgagcatggggcattattaaatgatgaaaatggagaagtgtgtgaagtcgtagttattataaaaatatttaattatatatttgaaataatagatatagaaagaaataaaaatacatgtgatattagatttttacctataatatatgaattaaaaaaatttaatgaaaaaaaaaaaattactattaaaaagtatgatataaattatgatatatataatgaatattcattaaaaaataaagtatttaaaacatttattaaattatatatacaaacaaatattgatgaaaagggaatagtctcaatatatttctcatcaaatctatttattaataattcaacaaatagtgattttgttttattgtttcaccctgtactttattattttatgttatttaatgaacagtccacaaatagtaacactaacaataatataaacaacaacaataaaaatgaggataacatggtcgataataatgaaaataatgataaaaataatgataaaaataatgataaaaataataatgaaaataaggattgtgatagtgtccataatattaataatgtggaaagcgattcaccagtaaatataaactttttcaaaaatgataattataataataattaccataataattaccataataattaccataataataatgacaaaggtgcaaatataactattattaattccaatgaaaggtattttttacctcttatttcttttatacctattattattttatatgattatttaaagaaaaaaaatgaaatcgaagaaaataattaccctgacaagtatccaatgaattctaagaattcttatgtaacacctgtctcaatggtatgtgatttaaaaggaagcttcagtgcagatataaaaaaaaataatttcataaaacgatttaattcgttaaattataatatgaatattcataatggtgaagaggaagaaatatctaagcagaatgaagccaatgatatgttaaattatacccacgtggataatagtaacaacgaaacatcttgcagaaataataatgaagataaaatattaagttataagaaaagaattacttatgattattcttcgattaattctttaaaaaaattgtcatacaataacttaacacgtgctagctgttatgttaactccagaagtagcgaaatgaacctttgtaatataatatcgaataaaggagataaaagaaattttatgaacaatgaaaaaataatagaatctcttaatttgaatgctttaagagaaattaataaaataagaactaatagaatattaaaaagattagaaaaatatgtaaatgaaaaaagtaatagtaagaatatgaaaaatattaattatatttatattattaaaaaagaattttatgatttctatattcataaaaatgaaaataataataaatgttattttgaaatgtttaattttttaataaaaaatggagccaaaaaagttttaaataattcaagtataaaagaaattatctgtagacattcctttgattttttaaaatataatttatatgcacaaacattaaaattaaaaactttaaaaattatatgttatgataagtatagtagatatttaagggagaagaaaaaggaaatggaagaagctaaaacgtataataataataataataaaaataacatcaacaataataataacaacaatgataataacaacaataataataacaacaacaataataataacaataataataataatatgaagaaaaagcaaattggtgatatatatatgaaaaattataaagaagaaaaaaatgatataaaggaagaacaagaaaaacatgataatagtagtagtattgtggtgttaaataaatttcatgattattatgataaaagagataagtattattttgaaaacaaccacaggaatgaccattacacaagtgacttaaataatgatgataataataaatataatatttatgataataataaatatagtatttatgataataataaatatcatatttatgataataatgaaagtaacaataaaaaggatgatttttattatagcatacctactaatctcgatatttcacttaaatgtataaatcgaaatgaaagacacatcaacagtcttctatttaatcatagtaagaggaaatctacattaagcaacatactaataaaacatgatatgattaaaaatagtgtatctaaacatatcctgaataatgattatgcatatgaatatgataaaaaggaagaaatagaatataactataataataaggataattgtgaaaaaaatatatatgtgcttgatgtaaaaaataaaaaacaaaataataataataatatgaacgatgatgatgatgataataataatatgaacgatgatgatgatgataataataatatgaacgatgatgatgatgataataataatatgaacgatgatgataataataatgataataataatgataagaagaagcatcatattatccattataataataataatattataaaaaagaaaagaaggaaatttatatttactgcaaagaaacaaagtagttatagtaatacaattatatgtgaacaaaagaatatagatgtgaataaaatatattcgtttggtatatatattgattatatatttgaaatccataactttatgcatgaagaaatgaaaattggttattgtcagaaatattatataaacagtatacctaaaaagattaaaagaattaaacgagaagagatatcacctaaatcaataaaatatttagatacgataccgaaatatattaaattattttatgtattaaataatgataattatatatttaattttttttctaaaaaaattcaattatataaatatgctaatacaccagataaaattcatcaaataaaaatgtatatagaatatattaatgatgaaaataaaaatataatatataagaaaagaaaatataaattaaattctttatttaaaagaaaatcaaaaaataaaaggaaatataaatatctagaatcaaaagattatgataaattatgtaaagaagtacctaagtttttttatcttaatattacatttcgaaagaaaacagatcattcaaataatacatattataatgaaaataattttaaacatgtaatagacagtaatgttttgcaattattaatttatccatctttcttttttcaaaataatctagataacgatttaataattaaatccaatggaaatttacaaaaaattaaaaaaaaatcaataatgttttttggtgatgttgataatagtaaagttatattacaaatagtatataataatcaaatattcctttctaaaaaaataaaaataaatcaagtatgtttaaataaaaaaatcatcttaacaagtaaaaataaaaaagaaaatattttcttatctatgaatattacattaaatggtaatatctataatacaaaaacaattactattaataatagatatacaattattaataataccaatcgaactttatatgtgcaagaagttaataaagatttcaaaattattaaaaaaaaggaaaaaaaatatatgacgtattcattttctttagaaaatttacaaaatcaaaataatcattcaaatgatgaaaatatggaaaaattatatatacctagtagtaatgatcttactaatataaaacgtaattataatcaaaaagaaaaaaatgaaaaaaatgaaaaaaaagaaaaaaatgaaaatttaaacaaaattacaatcaataaacgatcagatttaacgtatgagcacgaaaatgatgaaacaaaaattatggatacttgtgaaatttctgataagaaatatacggaaaaaggtatgacaaaaatatgtgaatttaataaaaagcatataaaatataataaacataaaaaatataacgacaagaaatataatcaaaaggaaaacaataataataataataatactacgagtagtaataatagtaatagtaatagtaatagtagtaacaacagacctaatattatttcaataaaaccatatgaatctttttattatcatcctattaacacaaataaatgcttcctaactttttcttatacaaatattatggaatgtaaaaatgataagaatttttatagaagaagaggtagctatgaatttacacatacacaaaatgaaatcacaaacttattcaataattatttaaaaaaaaaaattatgaaatctcaaaatatatctataataaatgataaagaagaaaacataaataataatgtacataaaaatcaagaattctataatttattttatactagtcctatagaaatcgaaaaggtaggtaattacaaaatttttcacaagacagtacataaaattgatgttacgtacaataatgaaaaagacgcaaccgacgatcaacctacatatgaggatgatattattcaaaaggaaataaaacaacaagaaaaagaaattgaagaagaaataaaaagagaaatagaagaactagaagaacatcgtgaaaaggaaactattattgtattttcaaatttgaaagattcatatgaaaaagaaatgcaaaaaaaaaaaaaagatcgacataagaaaaataactttcttaatataaactctgatcatattaatgataagaacattattaattcttataaaaatgaacaaaccactgaaatgatatatatacaacacgactatacagataatatacctgctgacgatgagaaaaaaagttcgcataatgaaactatacttatagatgatttaacattatttaataaaaataataaacatagtattaatgaaagggaaaataaagaaaacatatttaatgaaacggttttgacagtcgataataatgatactgaacatataaaaagcgactatgtaaatataaaaggcgattgtataaatataaaaggcgattgtataaatataaaaggcgattatgtaaatataaaagataattgggtagatataaaagataattgtgtaaatataaaagataattgtgtaaatataaaagataattgtgtaaatataaaaggcaattgtgtaaatacaaaggaggattctcataataattatcaacagaatggtatgaatctaagacatgattcgttttgtgaaaattatgttatagattttaatgatgatgattcttgtattcattttaaaaaaaataaaaatgatataaatacagcagatgatataaataataatacggtgattatccctattaaaagtataaagcaactagaaggagaagaaaatgtgcataatatagaaaataaaaataataacagcaataataataataataatcttttatgtgaattgaataaaacgagtgataataaagaacgaataaacacaaaacatatgtttttatataaagaagaaagtattattacagaaattaatatagcattaaatagtaatacaaatatcgaaataaatatatctatagaaaataacccagatactattatatataataaaacaaactattatttaatattttatcaaagaaaaacaaataaaaaaatagtaaatttgttgaaaccttttgataaagaaatattcggatggactgatgtttgtaaacctaaagttataaaatgctttttaattattcaaaaaaatgatgtgtatgtattttcatgtaatttaaatatagtaaaagaacataataatattatattaaataataatagaagaattattgtgttaaccaaaattgaaaatgggaaacgagttttttgtttagaagaaatgaatatcgaattattagattgtaatgaaaaatatgaacacaaaaaatctctagctccatttttttccgcaagtaaaggttttaatagatttagagaaaagaaaaaaaagaaaatcaaaaagaaattacataaaataagtttatataatagtttaatcaaatcatcacaaatgagaaaggaaaagaataaaagtaaaaataaaaaaaaaaataaaaaacaaaaaaaaaatcaaatgaatcaaatgaatcaaaccaatcaaaccaatcatatgttacaaaaaaacaaacaaactaatgataactatttagtaaaatataaaaatgaaaaatttaataagaaattaccattacttagtaaaaaacgttttaatattgcatatttaaaaaaaaaaagaaaacaaatcaaaaaaaaaaaaaataataaatattttcatttaagttcctttttcctattaaaaagtatggattcatcaatccataaagatgttgaaaaggaaaggaaaaaacaaaaaggaaaaagccaacaggcagaaaaattattcaaggtagaaaaaattgtacacaatgaatcttacaatgaatcgtataatgaatcgtataatgaatatcataatgaatatcacaatgaatatcacaatgaatatcacaatgaatatcataacgaaaataatggtaatataaattcaattaagtataataatattattaaagaagaagaaaatgtgaaaaataaaaatgcaacaagtaataataatagtagttttagtaaaaaaaatattaaattaaataatgtatctataaaaaaagatgataaaaaaaaatctacatcaaaatataaaagcttgaattctaaaaaacatattaataaattttttaatgacaattatacatttcgaaaaaaaaagaaaagaaaaaaaagtaataaaaaaaatttatatgtgaataaaaataatgaagagacagaaacaagtgattattatatagaacataatgaaaacaagaaaaatatcgaactttcttctcatgataacaattcttttgataatgagaaaaggaaaactagtttaggcatgacaaaatccaaaggatataacgatctttttactgttaagtttagaaaaagtgtaaatgaaaatgataaaattgatgaatataaagaaaatagttttgaagactctagtacatataatgattcatttttaagcagttcttcaaataatgagaattatatttctaataataataagaaacacatgtttcttaatagatattatgataataaagatgataagaagaaatatagagaatataatttaatatataataaagaaatgaaagctaaaaataatttaaaaaaacctaagaagaaaattaaaagaaaacttagtgattttatatttacaaaaattaaaaaaaatcaaaagaaatttaaaggacttagtagaatatatccaatgtttttaaaaagtaataaaagtgatgaatttaatgttcttataagaaattatttatcggacaaagatgatagcactagtataaggaaagaatataaaattataaatgataattatataaataataatgaaaataataataatgaaaatatgaattatgatttaaaaacaaatacttataataatattcttcataataataattatagattagataaaaaaagtgtatttgaagaaaatagaaaaatacccataaaatttataacaaatttaaatgtaatgttacgtggaataaaaattagtttatttgagcacacctgtgattatgttatatcttttgaaatcaatgaattattagttacaaaggaatatatggaatatatagattattataatgtagacataaaaataaataatattttatgttatgctgtatataaatatttaagtgcatgtgctgtattatatacaaataatgatagcaacataaaaaataatcacttacgtatgttaatgaatgaattaaaaattaaaaggaatttatttttacaaaaaaaaagaagaaatgaaaataaaaaggaatattctgatgttaatattgacaaaaataatgacaatattaaaaataatgacaatattaaaaataatgaccatattaatgataatgaccatattaatgataatgaccatattaatgataaggaccatattaataataaggaccatattaataataaggaccatattaatgataatgaaaaagaaatgtactcatcaggttcatccagaacaagttatacaaataaaaagaagggatataaatataaaaacaattataagaaaaaaaaaaaaaaaactgaaaaaaatatttatgataataaaaaagccaaaaaaaaaaaaaaagagaaagtagagaaaaagaaaaagaacctttttgtaaacaatgaatttcttatatgtaattttcaatatgtaaggaaatgtgaaacattattttttaaatatttcttattaagtttaaaacctattgttattaatgcagatattaattctataactatattgttctatttttataaaacgttttataattttcataccaaaaaaaatgaacagggtcaaggagtccaaaatggattcaacacggataattatgaaaaggtgcacatgagggaaataaatatgatgaaagaacaacaacaacaacaaaaaaaaaaaaaaaaagaagaagaagaagaagaagaagaagaagaagaagaagaagaagaaaaaaaaaaaaaaaacaaggaaaatgtattacaaaaaaaaaaaaccaaacaagaaatggagagacctttaaaagattattattattattattattcatctatgaatatattaaatgatccagataataataaaagatgtgatatacaaaaaaaccgtatgatcgaaaaaaatgatagcttttttataaatgtagatgaaaatagaaaacaaaaaatacaagatataactggtgatcatattattgataataatattttaagtcgaatgaaaaatatggaatcatttattatacatgaagaacaacaaaaaaatgatttaactttaacattacataataatatatataatgtagaaggagaatattataatataaaaaagagtaatatgaattattataataatataattaacaataaaaagtcttctgttcaaataaaaaaaaaaacaactcttatcgaaaaaaatgatattaataataaatatgtatatttacaatatataagtatagataaaataaatattttattaaatttccaatcagaatataaaaaagaattaacaaatcatgttaatgatttattttataaagaacatataagtgcttataataaattaggagatatttctaattgtaatatatatttaaaaagtttatccaatatacatatctttacaaattataatttgttaataaatttcctacaaaatttttattataaccaaactatagttaacctatcaaacttattaatttcttttaatattattggaagccctacatctttaatagcgcatgttaaaaatgcatttaatgaattcttctatataattaatgaagacacactatccaaaaaaaacagatatgatgatgacaaggacattaacgattacacaacaaaatacaacagaaaaaacaacaaaaaaaacaacagaaaaaacaacaaaaaaaacaacagaaaaaacaacagaaaaaacaacaaaaataatgataataacaatattaatagtatgtatggtagtcattataataataattatatttattataacgattattattataataataattacatgtatcgtcgtagtactcttaattatcattattatgaacaaggttatgataaatacaaattgaatcgtatatataataataacccgaaattaagaaaaaataataaagaaagaaaaaataatatacaacaaattaattatacaaccaaaaaagaagacaaacataatttcctaaatttaatagatcaatccagggaaagctcatttttagatgagaaagatgattccttaaccaatgatgataaatatattatgcatctactaaatgattataattcttcttatcaaaataatttattaagtgaagaagaatcttttgttaaaaggaatttcagctggaacttttttaaaaaacaacatacaaataataataataataattcggatgatgacaattattttaatgattcatataataacataaaacatgaaagttcggggaacttaaattatatgtacacaaaaagtattaaaaataaagatttacataaactagtaattgatgataataactcttctatgaattcattcctttttaataataaaaaaaatgttatcatattagatcaagtttctaaaaaaaagaaaaagaaattacaatatatcaaaaattttgaagaaccacaaaagggacatatatatatggatgatgacatgtatatagatgtagatgtagatctaaattcttatgcggaaggaaaaaatactacaaaagatacatccaaatatccaccacattttaaaatatcatatgatgaagaaaaaaaaaaaaggaaaaagaaaaggctttcaaccggtagtaataataatagatacaaaaatgatgcggaaatattagatatgaatccaaacaaaaaaaacaagaaaaaaaataaaatgctaaaaaataataataataataataataataataaaaataaaaaaaataaaagaaataataaaagaagtggttgtactaaaatgttcagattttttaaaaaaataggattaaatattatttatattttttcaaaaactaagagaatatgtattggtatatatgtattatttatacaattaatattatccttattattttctattacactaatattacaatctttaataaatttagtagaaaaggtaaatataaataatgcagataatgtgtttttaatatttaataaaaaatatgaaagaaaaaaagtagtggtatttaataatatagaggaatataataaatttaatattaccaaattattttattattatattagtatatatatgaatatagtgaatttcttatattataatatgttatataaaatgaagaagaaaaaaaaagatttatcgggagaagataaaatttttatgaagaaattaaaaatcaatttaaaaaataaaagaaaattttctttctttattaatttctttttaaatatatttaatatcatcaatatattattatttggacatatagttttcttacttttatgtttattaacaatgaataatatttttcaaaaaatacttacagcatgtattaaattagtatattaccaaagaaataaaaattatctagattttctcaataaaaacagttttaatcatatgaatattataagttatattaaaattaatcaagttataagtaaatatgtactattaaaagaacccttcaaatatttcttatctcatcaagatttcttggatattaaagcacctaaaaaaagaaattattttgtatataccaaagagctcttcttttatatacaagaaaataaaattgtattcttatttagaaaaaacgatatgaaaaaaattgacattattatacatactataaataatagtttcgcaataaatagttactataagaaaaagggtagtaagacagccaaaaaaagtagatccaaaaataccccatcgaattatactcttaatatggaacatgtgacaggagaagaaaataatagctttacttcatctttatataacaaaactaacgtatcgaatgatatatcagaggataaaaatgttatatgttttttaaatcaagaattagctttaaccaaaagaaacgaaattatacatataaataataaaaactatgattatattatttccataaaaataacaatcaaaaataatatgaatgttatggagaatatttattataaccccaaaaaattttttaagtgcttgtcaaaaatacaaaaaagcttcaataatatttatttacctttatgtaaaaataataataatgaaaccaaaaataataaggaaaaacatttaaataataaaggtgcagatatatataaagcagatataaatgtaaaaaaaagaagaacttttttttcagcaattatttgtttctttaaaagcattttcatatttttgtacttttgtctatgcccatggaaattgttaaagttaaaaaagaaaaaatcaaatgacaataaaaaaaaacaaatggacgaaaaagataaagaaaatgcagtccataaaaatatacaactaaaacataaaaataaaaaggaaaagacaacacccaacagtattatttttaaattaaactttgaagattttcaatcaactttaaatatatttgaatgtttgtgtaggattatgaataataattaa

SEQ ID NO: 12 - protein, 6934 aa, Plasmodium falciparum
MIKALYKSIVNFLLSSFFENIEEKQLQTSLIRGKVHLQNVKIKKFFCDFIYLPYTIKYGYIRSLDLQIPLLYLFQKASLKVSDVVIVLKEKHFSEYNIEEEINGIKGGKKNNLKLEDYNYNSNDVNQKINKGLNYLFYELYNNMSIDIENVEIILESSEKTTNVIGLFVKKISSVKTHNCTNKIIKDFSFVDAIFYMNDEKAKYAINKIIKKEEKKKKNKRNINEEDIYNKIKYICNNLHKKKYIISEIPSIVLSTSMYVSNSTDYYYHNSKFLFKKNSYFNITCTHCDKYLFQCKEVKKDKSIFQNIFIKKEKIQQRNKQLYSEINCKCMKNNKNIFQKDQNTNCTYNSDHVPENSLKGTNEMNKNIPPDLDSINVGHPKIDDDNEKNNHENNSHNDNHNNSHNDNHNNSHNDNHNNSHNDNHNDNHNNNHNDNHNLKHKRNYNHRNGGVGQNNTGDNNLLNNTFNKHNEERTVQEKDEKKSEDCIDCNCKKNISEDLDNCLYCRINNKNQSYIEKFHMLEENINLKENEYMTFELNVDKIDLILSFKQFYYILDIVNYYFIYSCLVNGLCIEEWLNIPEINDILIYKRELIKKKKKEKFDKDFIDKFEYTHSFQIISNIKKHVEEYSLDNNKRKKSIRGTGEDLSTLLNSNHNNEYNYKNEHNRHNEHNHHNEHDNNNNKVTKSQSASSHLSNVSTWNKPFFVYNKKISVNCSFNILIKKLNFCLCSGDKINKIIQINTDDFNFNVKSYINADFAYSLLLKDISVFFIHKDKKYPLFELFNVNEHNKKEDKKKENMKVNKRKSKTYIFNTHLCNDAMTSFKSVSSIKNVPGNMNNITDNMKNDNYNNIYKNNEKNVENGKKCSKYVESRNLVEINNRHNEYSKEKKNITNIKNDNINNNENNNYDNNINNKEEYAISLLTFTKYETTQAKTFIKFNKNILITLSVKEIYNILNMNCDYKPVDLEKKLKSYKILFYYYLLGKKYCKELYMASDKNFEDMNIHFMHNIYFNIIINKKYNLLFKMKKGLVNSFFFTKMYLHCDLKKLTMITDHNDMQQNMDNKLVDQYTEQMKENSSYQNSQSCSNTSSVGFTNEDPTKRRNKEKNNLNININLNLSTNDDVIINKNEEKENENKESNRTEHIKRDNSIHSNDNCSIGTHSELFKNSEYNSMINNNNNNNSFINNDNTSIDNKVSMQCRKYYQEFLKMNNLEDIKTIRKIEKRANQNNTSNNNTINNIHNINNVHNVNNIHNVNNIHNVNNIHNVNNIHNVNNIHNVNNVHNINNNYYDHIYSHNNIHINNHAIIHNNSHYNNKKTNIILNNNKYDEYNDKHSFHSENTNSYSNSNKDDYLNEDLNLYKDHMYIQNCITEKEDNIITTIYQKRTNFELSLFILKNKNNEKIQNILSHKNKINKKYILKPLKIYIDEITYNFKNSSDKKITFFHTNNYKNYLNFTLDDKIIFKLIFFYYHYKDYVDHIFEKFESKDESNYLNLNTIDVRSYKTLQILLDNAVHNKNDHWFNEQKDVHDKDEQNKGTIYYEQNEHDIKIDDNNEEENNDHTDNNNKNNNNNNNNNNNKNNNNNNNNNKNNMVDGQIECNENVTEKEIPSNVPNSNNLTNESSNDNHNKTTIEHNNNFCEEQNKNDLIKTSFNITHCEEENANKNKYTEEDKKEIKGNDKKNVEMCRKDTLDYVKEDINKYKMYINENNNKKEEEYSHNNNNHHHHYHHNNMLKDDTSNYNHVQYFHGEKKEIICFINKSKIHFNNYKKSKRMISIHLSDVLMYLFSDNNITNFLFNLKKINILNCLSHEDSYNSFFSYIQHKKFSTHKISKKGSKLSDKRKSSNVNGIYFYNSVFKLIQNGTFLLKYSSKNNISCLSSIHLNPNHNHYIENNNSKEKNYFLNNNNNNNNKMEIEETTEFRYFNTNNFEQLNNTSGNKSIDGSNVKINNSLDFVHKNYYNNLNNDYFNFNVPQDSNKRKDATSSPSNVSNKSGEIKSSHKKEQRKDNHMNENIRGSHRSYSTHQSYRTHQSYKRHANNSNIRCSSSPSERTHISKKDEIKFNKENIMTLLNDCTNNEGENHHVKITNKQIKRSKSKEQFEDIINSNTKKTNDIEHIWDEQNNQNNKENDNVVNRVEKKSIITENYIPYKSCIEQIDDIDYNKESLQHEKNIDGKTNIIYHNNNNNNDHINMNTTTCIPINEKNFVIQRNKKISHYYNAKEYNDSNKRRRNNYILTGEVNNIKGYNKDDMHSSHVNNMNNSLCSSAYHNMKYEKYVDIEKYRNDDEFYEAEDDEDEENDIDNQEEEYIDMKKKENENISSIEFHMINSEFIVDYLYFIYLFKWINKLYRKYEKIKQLSDFAYSNNNSTDDEESNINVSKCNYILFLQNNKIYVPIYNYSISQYKYYNSLKGTSYVSLLPVLELHFSCSYKSMNENDENVKSINVRNLGSALVIPSINIYKHKKNKKSNICVITFNRKDKNNESIINDLRFQINMRRNYNYEIIENEDDNSSSCNNMEIPYYEPKYTSLNTYCTVISKEQMYSEKNKNKNNNINNNNNDNNIIMYDNNMYNYHGYHTKTGSYPKKIISFHCDPIILNFSKDILKNVLIFYNTFCYFINNCSKNDDTGNDSNMIRDMLYYLYNQSSDILFEYFLDDIRLNCYDGNINRNVPLIVVSLFNLKFFLQKDIISIYNFLNFYLNIDIYDSYKILYDTLLEKMEIYLTFENNRNKLNILNLTLETSYINILYTNKSKNILINFLEPILNKNFYYFSSSYYNNLDITKNKRRKRSIYHHHNHNYHHECYENNILIKNTKGKSLVTHITSKIFNYTGLSINVRFKQSLRNKIQNNSLNNKNKNKYLFYELQNNEHGALLNDENGEVCEVVVIIKIFNYIFEIIDIERNKNTCDIRFLPIIYELKKFNEKKKITIKKYDINYDIYNEYSLKNKVFKTFIKLYIQTNIDEKGIVSIYFSSNLFINNSTNSDFVLLFHPVLYYFMLFNEQSTNSNTNNNINNNNKNEDNMVDNNENNDKNNDKNNDKNNNENKDCDSVHNINNVESDSPVNINFFKNDNYNNNYHNNYHNNYHNNNDKGANITIINSNERYFLPLISFIPIIILYDYLKKKNEIEENNYPDKYPMNSKNSYVTPVSMVCDLKGSFSADIKKNNFIKRFNSLNYNMNIHNGEEEEISKQNEANDMLNYTHVDNSNNETSCRNNNEDKILSYKKRITYDYSSINSLKKLSYNNLTRASCYVNSRSSEMNLCNIISNKGDKRNFMNNEKIIESLNLNALREINKIRTNRILKRLEKYVNEKSNSKNMKNINYIYIIKKEFYDFYIHKNENNNKCYFEMFNFLIKNGAKKVLNNSSIKEIICRHSFDFLKYNLYAQTLKLKTLKIICYDKYSRYLREKKKEMEEAKTYNNNNNKNNINNNNNNNDNNNNNNNNNNNNNNNNNNMKKKQIGDIYMKNYKEEKNDIKEEQEKHDNSSSIVVLNKFHDYYDKRDKYYFENNHRNDHYTSDLNNDDNNKYNIYDNNKYSIYDNNKYHIYDNNESNNKKDDFYYSIPTNLDISLKCINRNERHINSLLFNHSKRKSTLSNILIKHDMIKNSVSKHILNNDYAYEYDKKEEIEYNYNNKDNCEKNIYVLDVKNKKQNNNNNMNDDDDDNNNMNDDDDDNNNMNDDDDDNNNMNDDDNNNDNNNDKKKHHIIHYNNNNIIKKKRRKFIFTAKKQSSYSNTIICEQKNIDVNKIYSFGIYIDYIFEIHNFMHEEMKIGYCQKYYINSIPKKIKRIKREEISPKSIKYLDTIPKYIKLFYVLNNDNYIFNFFSKKIQLYKYANTPDKIHQIKMYIEYINDENKNIIYKKRKYKLNSLFKRKSKNKRKYKYLESKDYDKLCKEVPKFFYLNITFRKKTDHSNNTYYNENNFKHVIDSNVLQLLIYPSFFFQNNLDNDLIIKSNGNLQKIKKKSIMFFGDVDNSKVILQIVYNNQIFLSKKIKINQVCLNKKIILTSKNKKENIFLSMNITLNGNIYNTKTITINNRYTIINNTNRTLYVQEVNKDFKIIKKKEKKYMTYSFSLENLQNQNNHSNDENMEKLYIPSSNDLTNIKRNYNQKEKNEKNEKKEKNENLNKITINKRSDLTYEHENDETKIMDTCEISDKKYTEKGMTKICEFNKKHIKYNKHKKYNDKKYNQKENNNNNNNTTSSNNSNSNSNSSNNRPNIISIKPYESFYYHPINTNKCFLTFSYTNIMECKNDKNFYRRRGSYEFTHTQNEITNLFNNYLKKKIMKSQNISIINDKEENINNNVHKNQEFYNLFYTSPIEIEKVGNYKIFHKTVHKIDVTYNNEKDATDDQPTYEDDIIQKEIKQQEKEIEEEIKREIEELEEHREKETIIVFSNLKDSYEKEMQKKKKDRHKKNNFLNINSDHINDKNIINSYKNEQTTEMIYIQHDYTDNIPADDEKKSSHNETILIDDLTLFNKNNKHSINERENKENIFNETVLTVDNNDTEHIKSDYVNIKGDCINIKGDCINIKGDYVNIKDNWVDIKDNCVNIKDNCVNIKDNCVNIKGNCVNTKEDSHNNYQQNGMNLRHDSFCENYVIDFNDDDSCIHFKKNKNDINTADDINNNTVIIPIKSIKQLEGEENVHNIENKNNNSNNNNNNLLCELNKTSDNKERINTKHMFLYKEESIITEINIALNSNTNIEINISIENNPDTIIYNKTNYYLIFYQRKTNKKIVNLLKPFDKEIFGWTDVCKPKVIKCFLIIQKNDVYVFSCNLNIVKEHNNIILNNNRRIIVLTKIENGKRVFCLEEMNIELLDCNEKYEHKKSLAPFFSASKGFNRFREKKKKKIKKKLHKISLYNSLIKSSQMRKEKNKSKNKKKNKKQKKNQMNQMNQTNQTNHMLQKNKQTNDNYLVKYKNEKFNKKLPLLSKKRFNIAYLKKKRKQIKKKKNNKYFHLSSFFLLKSMDSSIHKDVEKERKKQKGKSQQAEKLFKVEKIVHNESYNESYNESYNEYHNEYHNEYHNEYHNEYHNENNGNINSIKYNNIIKEEENVKNKNATSNNNSSFSKKNIKLNNVSIKKDDKKKSTSKYKSLNSKKHINKFFNDNYTFRKKKKRKKSNKKNLYVNKNNEETETSDYYIEHNENKKNIELSSHDNNSFDNEKRKTSLGMTKSKGYNDLFTVKFRKSVNENDKIDEYKENSFEDSSTYNDSFLSSSSNNENYISNNNKKHMFLNRYYDNKDDKKKYREYNLIYNKEMKAKNNLKKPKKKIKRKLSDFIFTKIKKNQKKFKGLSRIYPMFLKSNKSDEFNVLIRNYLSDKDDSTSIRKEYKIINDNYINNNENNNNENMNYDLKTNTYNNILHNNNYRLDKKSVFEENRKIPIKFITNLNVMLRGIKISLFEHTCDYVISFEINELLVTKEYMEYIDYYNVDIKINNILCYAVYKYLSACAVLYTNNDSNIKNNHLRMLMNELKIKRNLFLQKKRRNENKKEYSDVNIDKNNDNIKNNDNIKNNDHINDNDHINDNDHINDKDHINNKDHINNKDHINDNEKEMYSSGSSRTSYTNKKKGYKYKNNYKKKKKKTEKNIYDNKKAKKKKKEKVEKKKKNLFVNNEFLICNFQYVRKCETLFFKYFLLSLKPIVINADINSITILFYFYKTFYNFHTKKNEQGQGVQNGFNTDNYEKVHMREINMMKEQQQQQKKKKKEEEEEEEEEEEEEEEKKKKNKENVLQKKKTKQEMERPLKDYYYYYYSSMNILNDPDNNKRCDIQKNRMIEKNDSFFINVDENRKQKIQDITGDHIIDNNILSRMKNMESFIIHEEQQKNDLTLTLHNNIYNVEGEYYNIKKSNMNYYNNIINNKKSSVQIKKKTTLIEKNDINNKYVYLQYISIDKINILLNFQSEYKKELTNHVNDLFYKEHISAYNKLGDISNCNIYLKSLSNIHIFTNYNLLINFLQNFYYNQTIVNLSNLLISFNIIGSPTSLIAHVKNAFNEFFYIINEDTLSKKNRYDDDKDINDYTTKYNRKNNKKNNRKNNKKNNRKNNRKNNKNNDNNNINSMYGSHYNNNYIYYNDYYYNNNYMYRRSTLNYHYYEQGYDKYKLNRIYNNNPKLRKNNKERKNNIQQINYTTKKEDKHNFLNLIDQSRESSFLDEKDDSLTNDDKYIMHLLNDYNSSYQNNLLSEEESFVKRNFSWNFFKKQHTNNNNNNSDDDNYFNDSYNNIKHESSGNLNYMYTKSIKNKDLHKLVIDDNNSSMNSFLFNNKKNVIILDQVSKKKKKKLQYIKNFEEPQKGHIYMDDDMYIDVDVDLNSYAEGKNTTKDTSKYPPHFKISYDEEKKKRKKKRLSTGSNNNRYKNDAEILDMNPNKKNKKKNKMLKNNNNNNNNNKNKKNKRNNKRSGCTKMFRFFKKIGLNIIYIFSKTKRICIGIYVLFIQLILSLLFSITLILQSLINLVEKVNINNADNVFLIFNKKYERKKVVVFNNIEEYNKFNITKLFYYYISIYMNIVNFLYYNMLYKMKKKKKDLSGEDKIFMKKLKINLKNKRKFSFFINFFLNIFNIINILLFGHIVFLLLCLLTMNNIFQKILTACIKLVYYQRNKNYLDFLNKNSFNHMNIISYIKINQVISKYVLLKEPFKYFLSHQDFLDIKAPKKRNYFVYTKELFFYIQENKIVFLFRKNDMKKIDIIIHTINNSFAINSYYKKKGSKTAKKSRSKNTPSNYTLNMEHVTGEENNSFTSSLYNKTNVSNDISEDKNVICFLNQELALTKRNEIIHINNKNYDYIISIKITIKNNMNVMENIYYNPKKFFKCLSKIQKSFNNIYLPLCKNNNNETKNNKEKHLNNKGADIYKADINVKKRRTFFSAIICFFKSIFIFLYFCLCPWKLLKLKKKKSNDNKKKQMDEKDKENAVHKNIQLKHKNKKEKTTPNSIIFKLNFEDFQSTLNIFECLCRIMNNN

SEQ ID NO: 13 - DNA, 7458 bp, Plasmodium falciparum
atgttttcagtcgaattagaaaatcgatcaggttataaaaaaaggaaaaaaaagaaatggaataataaaagtactggtcaggataaatttacgaacaaagatattatatcagaggaaaaagaagaaggacttgatatagaatgtggtcataatattctgggggatgtacaatatgatggtacatataatataaatgaacaagttaagaaaaattcattgttctattttaaatgtaaagaggaaattaatttaaaagatggaaatataatattggatgataaaaatagaaaagtggatgatataaatataacaggggatgataaaaatataaaagtggatgataaaaatataaaagtggatgataaaaatataacaggggaggataaaaatataacaggggaggataaaaatataacaggggatgataaaaatataatttttgatgttgatgaaatattaatccatcaacataatacatcaaatagtaatatatatataaattgtaatgataataataatgatattaggaacagttcaaatgtacagcattattataatgataaaataaaagaaaatataaataaacaaaataaaaagtatgttttaataaatgattatataaataataaatatattttatcaaaaaataagacatgtaaaataaataaaggaaaaaaattaattaaaaaaaaaaaagtaaataatatttctaggaggaggaatcatatattatataaatgtcgtaataagttatataatggaaatgttttttctgacgatattattaaaagtgaagtgaatgtatgtaattcgttaactgtacttcataagaattataatattaatatggataattatttagatgataatatacatacaaataatagcaatatttatgatattaattatacaaatgaaaatgttattaattcaacatgtcgttattatcccataggtaataataacacattaagtaaagatgaagttacaaaatcaagttcaaaaattaattccctttcttattttgatgatattattaatgtaaataaaaatgatatacctattttacatgataaagaaaatataaatataataagtaacaaggaaagctgtcataaggatgaaaaggaggaagagaaatatatcatgtataattcaaatttagtagaagaaaaaaaacaaaaaaaaatgatttggaattctcttaatgtattaccaatagatatactacttaaaaatggacatgatgaaattaataaagagatatgcaaaaaaaaaaaaaaaagtttttttagtcagaatgatataaagtctaaaatgttatacaataataaaagttattcaaaaagtgaaaaagtattatatacaaataataaaaacagtaatacgttcattcctatatttttcttaaataaggtaggagacaagtttaaaaactctgagaatatatatgatatgtataataataaaaaaaatgtctatatacatgataagaagatatatactaatatgtattctaataaattaaaacagaaacattattatagcacttctaatataaatttattatataataatataggaaaggtattagataatggtctacatttatcgaataatatgtattgtcgtttaaattcaaatccaccatataagagtatctcgttaattaataacaatgtttttttttataaaaagaggaaaagtaatagtaataataataataataataataatattagtagtagtagtagtagtagtagtaaaaaaaatcacgtgatcattaataaaaaaatatcatcttataatattcattataaagaaagaaaggattcgtttaaagagaattttttatttttcaaagagaaaattttaccatcaaaaaaagatacttgtgtttttaatgaaagacaaaaagatctttttgaaaaaagtaatgaacatattaaatgcgtttcttcttttaataatacatcagatgatatttcttcacattcaagcgtaaataagaaagaacctttttttgctttaaaaaataattccataaggcacataccaaaagaaaataatataatatatacatctgggaaatcttttaatcatgtgcaggataaggaaaagactgttctacttaaaaaaaagaaagaaataaatgataagaatacatttagctcttgtttaataaaccataatataacaacatatacattacaaaatggagtaaataaaaatttaaatatgttaggaataagagattctatttataaaatagatgaaaagaacaatatgttgaaagaatgttataatggaaataatgatagtaataataagaaaaaaaagaagaaaaaaaaattatctttttcatgtgatattataaatgataatattacaccttatgaatcagataaggagaaaaacaattctaataatattaagagtatggatatatttaattatgtaaaaagaaaaagcaacctttataataatttatcttcgaacagggattctactgtagatatgcataataaatataatagtgaagaatatataaatatacagagaacaaataaaatatatgaattgagtaataaaagaattagaaattataaattgtatagtatggatgaaatatttaaggtgtctcttaaggaaaaaaaatatatagataatatttctaataatatggaaagagtaacatataaaaatgaaatgataaatgaaaagataagtaagatggacgatatattatatccttgtgacaaaaataaatctttaaacatgtcttgtcctgttataatagaaaataatatatcaagagaagaaaatgaaaaaaattcaagtgttatattaaataaaaaaaagaatgagaatatgtttaattgtgttggaaggttacattgtcacatgggcaaaatgaataatcaagataatatatatgaccaagggaatataaaaaaaaatgaagaagaaataaccaaacatgatgaatatatatcaagggaagaaaaaaataaatataatagtaaatgtattagaaattttgatgactataaatatgaacaagtgttgagttaccatacgttggatgaagacaaaaaaaaaaatgatatgaacaatttaatagatatgaataatgaggcgattattgaaacggtgaatggtgttattaataatattatattggatagaaaagataataacagtaggaaggatatggagaaagagatggagaaggagatggagaagaagatggagaaggagatggagaaggtgatggagaaggagatggagaaggtgatggagaaggaggtggagaaagaattgaaaaatgagatgaacaataggatgaacaataggatgaacaatgagatgaaaaatgaaataaacatttataaaaacaatgagatatatgtagataatgataaagaactagaaattgtaaatgaggagaagaaacttatttacccatttaattacgaatctgatgtacataaaaatatgaatatgtcaattaatataaataattgtaaagatgattataataatatattaaaagaatatgtagataattcatgtcttgctcaaaaggaagagaatatatttcgacctttattcaatttaaataagaaagataaagtatggaaacgttttaatataaagaataatattaagacaataatacataatgaagagatgaaaagaatatatcaaactattaataaaaatgtttttcctatttataattttaatcgatatgaaaattttttaataaatcatttaacatataattttccaaaaaatgatttatttaaattatcatacaaagtaagtatgaataatataaggaatttgtatattgctaataaacatataaataataattatgattatatgaataaattatataatcaaaatatatatacattaaaatatcaggtagctaatatagataatgatcatcatatatgtaagaaagggggagggttggattatataaatatgaatatatcaaaagaatgtaaaaataggaaagacaaaacatatttaaataaaatatttcattataagaagaaaaaggatgcacgcttttttataaatgacgaaattggttctaatgattatatgtatgatataaaaaaaaaatatagtaacgatgaaaataattataaattaaatgaaaagatgaacatatctatgtcaaatgatgaagatatgattcctacgttaaatagtgaacatggaaataattttccaagttgtcaaccgaatttattagaaaaaaaaagtacttatatagatttgaacttatatgatagtaattctatggacgattttacagaagaaaaatataattttgttaataatgaaaatgatttattcaatactaaaagatggaagtttaatttttccaagggtaaaaatctgtttaataataaattttttaatgtatctaatgaggatggtgtgttttctttttttaaaaatatgaatctttttagggaacttaataaatcaaataatagcttaaaactagagagtgttaaaaatagtaataataattgtagtaataataagggtgatgataatattggaaatatggagaatatgaatacaacaaatgttacaattgcgagtgatgaacatatatctacaaagggagatatacacgacgaatcattttctagagacgataatgattgtatccttttaaaaattgaaggtagaagtaaaaaatatagtgatataaccttatataatgaggacaaaagtaatttggagaatgacaatgagactattaatgaatatgaaaatgtatgtagtaacatagatgttaatgaatgggaagataaggtaaatggtacatgtaatagtgttggtgataaagagactgaaaagaataatgaaaagaataatgaaaagaataatgaaaagaataatgaaaagaataatgaaaagaataatgaaaagaataatgaaaagaataatgaaaagaataatgaagaaaataatgaaggaaataatgaagaaaataatgaagaaaataatgaagaaaataatgaagaaaataatgatatagaaaagaatgatataaaggataataattcgggacaagtgaaagaaaatataattgttatgaataatacaaacaatatggatgttgataatgatgataataacaataattacaataatgttagtactgatgaaggtatagatataattaaaaacatcaaaagtgagatgaatgattatatttataatgataatattatgattaagataaataataaaagtatagatcttatgaatataaaaaatcaaaagaatgaaccttttttaaattatacaaatgaaaaggatatacatatgaagagcaattcatcatataatgtaaatgataaaatgaatttatttaataataatgagaaaacagaaaaaaataatactagtttaaacgatttattatataaaagaaaagaagaattagatgatgaaaaaatatctgaatataaggatacaaatttaacaaacaatacctttgaacatatagctaaaaggattaatttaattttgaatgatacaattgaattttttcaaaaacatacatatcttcataatggttatggtaatgttcaggtgtgcaaaaagaacaagaggaaattagaaaaaaagaagttgaaaaaatggtcctgtatttataaaattaataaaattgtacgtaaaggggcccacggggtggtgttttctgcgtggagaagtgagaatgttgatttttttaatcattcgttttttgaaaacttaaatttggagaataaaaagaagggatatatcgatgaaacaaatgttaatgaaaattatgagtctgataatgaatatgatagtgatgaagatgatactgaaagtgataatgatgatgagcaaaataaagagaatgaaagaggtgatgaaaaggatggatatgaagaaatgaatgggggagataagaatgaagaaatgaatgggggagataagaatgaagaaatgaatgtgggagataaaaatggaggaataaatgaggaacataaaaatgaaggaataaatgaggaacataaggatgaactaataaataaggaacataaaaacgagcgaataaatgaggaacataaaaacgaacgaataaatgaggaacataaaaatgaaggaataaatgaggaacataaaaatgaaggaataaatgaggaacataaaaacgaacgaataaatgaggaacataaaaatgaaggaataaataaactgacctatcataatatgaataaaaataatatttcaaatgaaaataattataatgatgacgattcttatgatgaagataatttggtatccctgaagataataaacttaaaatatttaagtaaaaagaatagtttaaaaaacattttgagagaagtaaattttttaaaaatgtgtgaacatccaaatgtagtaaaatatttcgaatcttttttttggcctccttgttatttagttattgtgtgtgaatatttatcaggaggaacattatatgatttatataaaaattatggtagaatatcagaagatcttttagtatatatcttagatgatgtattaaatggtttaaattatttacataatgaatgtagttcaccacttatacatagagatataaaaccaacaaatatcgttctttccaaagatggtatagctaagataattgattttggttcttgtgaagaattgaaaaatagtgatcagtctaaagaattagtgggtactatatattatatatcacctgaaatattgatgagaactaattatgattgttcatctgatatatggtcattgggtattacaatatatgaaattgttttatgtaccttaccatggaaaagaaatcaatcatttgaaaattatataaaaaccataattaattcatcaccaaaaattaacataacagaaggatatagtaaacacttatgttattttgttgagaagtgtttacaaaagaaacctgagaacagaggaaatgtgaaagatttattaaatcataaatttttgattaaaaagaggtatattaaaaagaaacctagttctatatatgaaataagagatatattaaaaatatataatggtaaaggtaaaacaaatatcttccgaaatttttttaagaacctttttttcttcaatgataagaataaaaaaaaaaaaccaaataaaatgatcagttccaaatcctgtgatgcagaaatgttctttgaacagttaaaaagggaaaattttgatttttttgaaattaaattaaaagatgatgaaaatagtagatccttgaatacgtttaatataaatatatctaaagaaagagacgacatatcatattcttctttaaatttggaaaaaatcaaagaacacagtctcaatatggtagcatctgttgtcgggactgaacaatcccagaaatga

SEQ ID NO: 14 - protein, 2485 aa, Plasmodium falciparum
MFSVELENRSGYKKRKKKKWNNKSTGQDKFTNKDIISEEKEEGLDIECGHNILGDVQYDGTYNINEQVKKNSLFYFKCKEEINLKDGNIILDDKNRKVDDINITGDDKNIKVDDKNIKVDDKNITGEDKNITGEDKNITGDDKNIIFDVDEILIHQHNTSNSNIYINCNDNNNDIRNSSNVQHYYNDKIKENINKQNKKYVLINDYINNKYILSKNKTCKINKGKKLIKKKKVNNISRRRNHILYKCRNKLYNGNVFSDDIIKSEVNVCNSLTVLHKNYNINMDNYLDDNIHTNNSNIYDINYTNENVINSTCRYYPIGNNNTLSKDEVTKSSSKINSLSYFDDIINVNKNDIPILHDKENINIISNKESCHKDEKEEEKYIMYNSNLVEEKKQKKMIWNSLNVLPIDILLKNGHDEINKEICKKKKKSFFSQNDIKSKMLYNNKSYSKSEKVLYTNNKNSNTFIPIFFLNKVGDKFKNSENIYDMYNNKKNVYIHDKKIYTNMYSNKLKQKHYYSTSNINLLYNNIGKVLDNGLHLSNNMYCRLNSNPPYKSISLINNNVFFYKKRKSNSNNNNNNNNISSSSSSSSKKNHVIINKKISSYNIHYKERKDSFKENFLFFKEKILPSKKDTCVFNERQKDLFEKSNEHIKCVSSFNNTSDDISSHSSVNKKEPFFALKNNSIRHIPKENNIIYTSGKSFNHVQDKEKTVLLKKKKEINDKNTFSSCLINHNITTYTLQNGVNKNLNMLGIRDSIYKIDEKNNMLKECYNGNNDSNNKKKKKKKKLSFSCDIINDNITPYESDKEKNNSNNIKSMDIFNYVKRKSNLYNNLSSNRDSTVDMHNKYNSEEYINIQRTNKIYELSNKRIRNYKLYSMDEIFKVSLKEKKYIDNISNNMERVTYKNEMINEKISKMDDILYPCDKNKSLNMSCPVIIENNISREENEKNSSVILNKKKNENMFNCVGRLHCHMGKMNNQDNIYDQGNIKKNEEEITKHDEYISREEKNKYNSKCIRNFDDYKYEQVLSYHTLDEDKKKNDMNNLIDMNNEAIIETVNGVINNIILDRKDNNSRKDMEKEMEKEMEKKMEKEMEKVMEKEMEKVMEKEVEKELKNEMNNRMNNRMNNEMKNEINIYKNNEIYVDNDKELEIVNEEKKLIYPFNYESDVHKNMNMSININNCKDDYNNILKEYVDNSCLAQKEENIFRPLFNLNKKDKVWKRFNIKNNIKTIIHNEEMKRIYQTINKNVFPIYNFNRYENFLINHLTYNFPKNDLFKLSYKVSMNNIRNLYIANKHINNNYDYMNKLYNQNIYTLKYQVANIDNDHHICKKGGGLDYINMNISKECKNRKDKTYLNKIFHYKKKKDARFFINDEIGSNDYMYDIKKKYSNDENNYKLNEKMNISMSNDEDMIPTLNSEHGNNFPSCQPNLLEKKSTYIDLNLYDSNSMDDFTEEKYNFVNNENDLFNTKRWKFNFSKGKNLFNNKFFNVSNEDGVFSFFKNMNLFRELNKSNNSLKLESVKNSNNNCSNNKGDDNIGNMENMNTTNVTIASDEHISTKGDIHDESFSRDDNDCILLKIEGRSKKYSDITLYNEDKSNLENDNETINEYENVCSNIDVNEWEDKVNGTCNSVGDKETEKNNEKNNEKNNEKNNEKNNEKNNEKNNEKNNEKNNEENNEGNNEENNEENNEENNEENNDIEKNDIKDNNSGQVKENIIVMNNTNNMDVDNDDNNNNYNNVSTDEGIDIIKNIKSEMNDYIYNDNIMIKINNKSIDLMNIKNQKNEPFLNYTNEKDIHMKSNSSYNVNDKMNLFNNNEKTEKNNTSLNDLLYKRKEELDDEKISEYKDTNLTNNTFEHIAKRINLILNDTIEFFQKHTYLHNGYGNVQVCKKNKRKLEKKKLKKWSCIYKINKIVRKGAHGVVFSAWRSENVDFFNHSFFENLNLENKKKGYIDETNVNENYESDNEYDSDEDDTESDNDDEQNKENERGDEKDGYEEMNGGDKNEEMNGGDKNEEMNVGDKNGGINEEHKNEGINEEHKDELINKEHKNERINEEHKNERINEEHKNEGINEEHKNEGINEEHKNERINEEHKNEGINKLTYHNMNKNNISNENNYNDDDSYDEDNLVSLKIINLKYLSKKNSLKNILREVNFLKMCEHPNVVKYFESFFWPPCYLVIVCEYLSGGTLYDLYKNYGRISEDLLVYILDDVLNGLNYLHNECSSPLIHRDIKPTNIVLSKDGIAKIIDFGSCEELKNSDQSKELVGTIYYISPEILMRTNYDCSSDIWSLGITIYEIVLCTLPWKRNQSFENYIKTIINSSPKINITEGYSKHLCYFVEKCLQKKPENRGNVKDLLNHKFLIKKRYIKKKPSSIYEIRDILKIYNGKGKTNIFRNFFKNLFFFNDKNKKKKPNKMISSKSCDAEMFFEQLKRENFDFFEIKLKDDENSRSLNTFNINISKERDDISYSSLNLEKIKEHSLNMVASVVGTEQSQK

SEQ ID NO: 15 - DNA, 1869 bp, Plasmodium falciparum
atgagaaaattatactgcgtattattattgagcgcctttgagtttacatatatgataaactttggaagaggacagaattattgggaacatccatatcaaaatagtgatgtgtatcgtccaatcaacgaacatagggaacatccaaaagaatacgaatatccattacaccaggaacatacataccaacaagaagattcaggagaagacgaaaatacattacaacacgcatatccaatagaccacgaaggtgccgaacccgcaccacaagaacaaaatttattttcaagcattgaaatagtagaaagaagtaattatatgggtaatccatggacggaatatatggcaaaatatgatattgaagaagttcatggttcaggtataagagtagatttaggagaagatgctgaagtagctggaactcaatatagacttccatcagggaaatgtccagtatttggtaaaggtataattattgagaattcaaatactacttttttaacaccggtagctacgggaaatcaatatttaaaagatggaggttttgcttttcctccaacagaacctcttatgtcaccaatgacattagatgaaatgagacatttttataaagataataaatatgtaaaaaatttagatgaattgactttatgttcaagacatgcaggaaatatgattccagataatgataaaaattcaaattataaatatccagctgtttatgatgacaaagataaaaagtgtcatatattatatattgcagctcaagaaaataatggtcctagatattgtaataaagacgaaagtaaaagaaacagcatgttttgttttagaccagcaaaagatatatcatttcaaaactatacatatttaagtaagaatgtagttgataactgggaaaaagtttgccctagaaagaatttacagaatgcaaaattcggattatgggtcgatggaaattgtgaagatataccacatgtaaatgaatttccagcaattgatctttttgaatgtaataaattagtttttgaattgagtgcttcggatcaacctaaacaatatgaacaacatttaacagattatgaaaaaattaaagaaggtttcaaaaataagaacgctagtatgatcaaaagtgcttttcttcccactggtgcttttaaagcagatagatataaaagtcatggtaagggttataattggggaaattataacacagaaacacaaaaatgtgaaatttttaatgtcaaaccaacatgtttaattaacaattcatcatacattgctactactgctttgtcccatcccatcgaagttgaaaacaattttccatgttcattatataaagatgaaataatgaaagaaatcgaaagagaatcaaaacgaattaaattaaatgataatgatgatgaagggaataaaaaaattatagctccaagaatttttatttcagatgataaagacagtttaaaatgcccatgtgaccctgaaatggtaagtaatagtacatgtcgtttctttgtatgtaaatgtgtagaaagaagggcagaagtaacatcaaataatgaagttgtagttaaagaagaatataaagatgaatatgcagatattcctgaacataaaccaacttatgataaaatgaaaattataattgcatcatcagctgctgtcgctgtattagcaactattttaatggtttatctttataaaagaaaaggaaatgctgaaaaatatgataaaatggatgaaccacaagattatgggaaatcaaattcaagaaatgatgaaatgttagatcctgaggcatctttttggggggaagaaaaaagagcatcacatacaacaccagttctgatggaaaaaccatactattaa

SEQ ID NO: 16 - protein, 622 aa, Plasmodium falciparum
MRKLYCVLLLSAFEFTYMINFGRGQNYWEHPYQNSDVYRPINEHREHPKEYEYPLHQEHTYQQEDSGEDENTLQHAYPIDHEGAEPAPQEQNLFSSIEIVERSNYMGNPWTEYMAKYDIEEVHGSGIRVDLGEDAEVAGTQYRLPSGKCPVFGKGIIIENSNTTFLTPVATGNQYLKDGGFAFPPTEPLMSPMTLDEMRHFYKDNKYVKNLDELTLCSRHAGNMIPDNDKNSNYKYPAVYDDKDKKCHILYIAAQENNGPRYCNKDESKRNSMFCFRPAKDISFQNYTYLSKNVVDNWEKVCPRKNLQNAKFGLWVDGNCEDIPHVNEFPAIDLFECNKLVFELSASDQPKQYEQHLTDYEKIKEGFKNKNASMIKSAFLPTGAFKADRYKSHGKGYNWGNYNTETQKCEIFNVKPTCLINNSSYIATTALSHPIEVENNFPCSLYKDEIMKEIERESKRIKLNDNDDEGNKKIIAPRIFISDDKDSLKCPCDPEMVSNSTCRFFVCKCVERRAEVTSNNEVVVKEEYKDEYADIPEHKPTYDKMKIIIASSAAVAVLATILMVYLYKRKGNAEKYDKMDEPQDYGKSNSRNDEMLDPEASFWGEEKRASHTTPVLMEKPYY

SEQ ID NO: 17 - DNA, 1227 bp, Plasmodium falciparum
atgttactcttttttgcaaaacttgtcgtatttacctttttcttttggcttttaaaatatgggaaaacgaggtcatatcccaaatctggccataagggacatacgaaattaaatcaaccagtagttagaacattagcagattttaatgacatgtttgcaaaccaaaaaaatacatttaattttctaaaacatataaatcattataaaaatgaacaagatacaaataatacacacacgccaaatcatgatgaatattctcataatttgccaaaaaatcacgaagagtcaaatgcaaatatgaacaatcataattctttcaatgacaaatctgttaataaaaaagaagctttcgatcaatttttacaaacgttattaaacaattatgaaataatgcataaagaagatgaaagtaaagaatcaaatcaacataactataaagaaggtccctcatatgaagataaaaaaaatatgtacaaagaaatattgaaaggatattataatgtattttttgaaaattatgcaaacgacacagaatcaaatgtacataataaacctgaggaagttcataaacatgaggaaattcataaacataggaaacttcataaacatgaagaagttcataaacctgaggaatttcataaacctgaggaatttcataaacatgagaaagttcataaacatgaagaagttcataaacctgaggaagttcataaacatgaggaaaatcataaacatgaggaaaatcataaacctcaaatggtaggtcaagcacctccagaaaaagagatacgccaagaatcaagaactctaatacttggttcatttccccaagcaggtgaaatattaagagaggatttatggaacaaagaggataacaaatttagttacgcacttgaccctaatgattatgcatctatagaagataaacttttaggatctatatttggatactttaaaaaaaatcatgacaatttggttaaacatttgttacaacaaattaatacttacaaacataaatatatggaacttaaagaacaatatattaatgaagttatgaaacttaaaaaaatatataacaaaagcatcatggtcatatttatagcatcttgtatttcaatattaggacctgtaatgttacacatgcatcaaaataatccagaagaattttttgcgaccatattaagtttttctatatcattaggtcttcataatttattactaacttaa

SEQ ID NO: 18 - protein, 408 aa, Plasmodium falciparum
MLLFFAKLVVFTFFFWLLKYGKTRSYPKSGHKGHTKLNQPVVRTLADFNDMFANQKNTFNFLKHINHYKNEQDTNNTHTPNHDEYSHNLPKNHEESNANMNNHNSFNDKSVNKKEAFDQFLQTLLNNYEIMHKEDESKESNQHNYKEGPSYEDKKNMYKEILKGYYNVFFENYANDTESNVHNKPEEVHKHEEIHKHRKLHKHEEVHKPEEFHKPEEFHKHEKVHKHEEVHKPEEVHKHEENHKHEENHKPQMVGQAPPEKEIRQESRTLILGSFPQAGEILREDLWNKEDNKFSYALDPNDYASIEDKLLGSIFGYFKKNHDNLVKHLLQQINTYKHKYMELKEQYINEVMKLKKIYNKSIMVIFIASCISILGPVMLHMHQNNPEEFFATILSFSISLGLHNLLLT

SEQ ID NO: 19 - DNA, 4398 bp, Plasmodium falciparum
atggattatttgattaggaataatgaatactgtaatgttttatatgatggaaatgaattattaaggaaaagaaaaataaattttgacaatgagatttgtccttataaaatgaattattggaataattacaacaataacataaatattgataatgataatatgaataatgaaatagtaaatgaagaatttgagaatacttataataatattaataataatatgtattatcttcttggaaaagaggacatggacgaacctagattgtgtaataaaaaaagaaatgtttacaatgaaaattttaagaataacttagaatatgatgagaatgtaaataattatgataatgataacagtagtaatatatcatacaaatttattaataatgagtgtgacaagatgaaaaaatctggagaaggtactcaggagaacaatgataatgaaaataataataatgatgagagtaacaataataataataataataataatgagagtaataataataataataataatgagagtaacaataataataataataataataataatgagagtaacaataataataataataatgagagtaataataataatcatgggaataataataatagtagtaataataacaacaataataataataataacaacaacaacaacaataataataataataataataataataataacaataataataacaacaataataatgataagaatgaagatgatgaaaatactacagggaaaggaaaaaaaacagaagtcaaaaaacgtgcagggagaaaaagaaatgattccacaatgtatgccaatagtaatacaatgttaaaaaataattttttacaaaataataaaatgatttataataatatggatcatataaatgatacaaatgaacaagataaatttttatatgaacaaagaaaaatgatgatgaataataaaatggaaaatatgggacccaatatgaatatgacaaataaaaattattttcaaacagtaaataacatgaaaatgaatgtagaaaataataaaaatcttataggtataaatacaaataatatgaataattatcaaaataatataaatagtattaatactaatatgaatataccaaagaacaaaaatttacattcaaataaacaaatgatgtttatgaataataatatgaatatacatggaaaaaccaataaattaaatgatatggctagaatgaatagtataaactttaatgaagaaaataaaatgtctgttatgaatgacgacacaagaatggataataaaatgagggatataatgaaaagtggtggaatggaggtacatttaaaaaatgaagaatccttatatatgaataatatgtataatatgaatagtaataatccaaataatatacctagaattagtacaatgaatattgcaaaacctatgaataattttaataatatgaatatgcctataaataatatgaatgcatataacaatcacatgattaattcgtataataatatgatgatgacaaataatatgaacaacataaataatataaataatataaatcatataaataataataataatagtaataataataataatagtaataatagtaataataatattaattttggtcagcatattcagggggtacaatttatgaatcctaatatgaataacgacatgaacagtaatatgaataatattaataataatcaaatgttcttgaataataaccagaataatgcacatgttcatatggttaacaacatgaatttgaatccctctggaaataattcattttttaataattcaaataaacatctgaatatgatgaccatgagttcaaaaaataaaaaaaacgccatattaaaaaatacagaaaataatgaatttgaaaatataaaaagagtacattcaaacagctccaactataataataataataataataatagtgatagtaataataaaaaatcgattaaaatgaatagcaatgaaaacaataatacaacaacaactattataaaaaatatacgagttgaaaacataaagtttaatgaaagtgtcaatttaaaaaatattgatggcttagatctaagtactaattttgttaatggaaaatatatatccaaattaaataatgatgagaaaatatataatgtagtacattctattgtgaaagattctctcaaagattgtttagttgatttttataataatgcaaattatatttttaaagataaattagattttgtatgtaatagtaatactcctacatgtaataatataaatgatttagaagacaacaaaaaggatgacgggcatgtggataaacaaaattattcacttgaaaagaaagataatgaagaacacacaaataataattctgatcctataatggatggtgttgagttggatgtaaaaaagatatctgaaaagaaggaggatcaaattgaaaaggacaaaccaaaaaatgataatacaaaaaatgataatacaaaggaagacaaaaatcaaaatgatgataataaaactaatacatcaattccaaaaactcccaaaaatgaagttaaaaatgttattacctcttccttattgtcaagttttaatatatttagtgctttcagtaatagtaatacacctaattcgaaaaaaaataaatatgatgaagaggaagaaaaagaagaaaaagaagaagaagaagaaaataataaatgtaatgataaagatgatgaggataaaaataagtctcctcaaaatgaagataataaaaatattaccaatgataataatgataataataataataatgtagacaaagaaaacaatttaaaagaatctatagataacctaggaaatgttgatacagataataatattaagagagatgtactaaattataataatatagaagaaaatgaacaaagcagagaatatattttaatagaaattacaaaaagtatatgctctataatcaatctacaacaattaatgcctgttaatactaggttagctaaccctaatcttatatatgatccaaattatgaaaccatatattctaaatggaaaacatttttaagaaaagagcaatcaagtggaaatttaattagtaattgtttttcacgagattttttacatactattttgttatgtaattatgtaactataattgaagatttaagaaaaacggccgttaagaaaaagttgaaatattttttcttacacttatgtttggaatcgggcatatcgattaacgttgcattgatgctgtttataaatgccacgaagcagagcgataagttacagtctctactaccctccgaaacaggattaggatatttgcacagagatgcgggtggagcaaaagaagagaatatgggtattataacatttgaatgtataacgaacgatagggaaccagatcatttaataaaattaataactttgaaaaatattttctcaagacagttaccaaaaatgcctagagaatatatagtaaggcttgtatttgatagaaatcattatacattttgtttattaaaaaaaaatactgttataggtggagtatgtttcagaccatattttgaacagaaatttgcggaaattgcatttttagctgttacctcaactgagcaggtaaaaggatatggtacaagattaatgaatcatttgaaggagcatgtaaagaagtttggtatagaatatttcttaacctatgcagataactttgccataggatattttagaaaacaaggattttcacaaaaaatttccatgccaaaagaaagatggtttggatatattaaagattatgatggtggtacattaatggaatgttacattttcccaaacatcaattatttgagactttcggaaatgttatatgagcaaaaaaaagcagtaaagaaagctatacattttataaaacctcaagttatatataagggtattaattattttgctgataataaaggggctgctttacatccaagtactattcctggattattagaagttggctggaaaaaggaaacgagggaaattactaaaaaggttcaacataaagaagttcaattgaaagatcaaattttaggtgttctggattatttagaaaaacaacagtctgcatggccatttcttaagccagttagtctttcagaagctcctgattattatgatattataaaagaaccaacagatattttgaccatgagaagaaaggccagacatggtgattataaaacgaaggaagattttggtattgagcttaagagaatgtttgataattgtcgtttgtataatgctccaacaactatttatttcaaatatgcaaatgaactacaaacacttatatggcctaaatatgaagctataactgatacagcaaaataa

SEQ ID NO: 20 - protein, 1465 aa, Plasmodium falciparum
MDYLIRNNEYCNVLYDGNELLRKRKINFDNEICPYKMNYWNNYNNNINIDNDNMNNEIVNEEFENTYNNINNNMYYLLGKEDMDEPRLCNKKRNVYNENFKNNLEYDENVNNYDNDNSSNISYKFINNECDKMKKSGEGTQENNDNENNNNDESNNNNNNNNNESNNNNNNNESNNNNNNNNNNESNNNNNNNESNNNNHGNNNNSSNNNNNNNNNNNNNNNNNNNNNNNNNNNNNNNNNDKNEDDENTTGKGKKTEVKKRAGRKRNDSTMYANSNTMLKNNFLQNNKMIYNNMDHINDTNEQDKFLYEQRKMMMNNKMENMGPNMNMTNKNYFQTVNNMKMNVENNKNLIGINTNNMNNYQNNINSINTNMNIPKNKNLHSNKQMMFMNNNMNIHGKTNKLNDMARMNSINFNEENKMSVMNDDTRMDNKMRDIMKSGGMEVHLKNEESLYMNNMYNMNSNNPNNIPRISTMNIAKPMNNFNNMNMPINNMNAYNNHMINSYNNMMMTNNMNNINNINNINHINNNNNSNNNNNSNNSNNNINFGQHIQGVQFMNPNMNNDMNSNMNNINNNQMFLNNNQNNAHVHMVNNMNLNPSGNNSFFNNSNKHLNMMTMSSKNKKNAILKNTENNEFENIKRVHSNSSNYNNNNNNNSDSNNKKSIKMNSNENNNTTTTIIKNIRVENIKFNESVNLKNIDGLDLSTNFVNGKYISKLNNDEKIYNVVHSIVKDSLKDCLVDFYNNANYIFKDKLDFVCNSNTPTCNNINDLEDNKKDDGHVDKQNYSLEKKDNEEHTNNNSDPIMDGVELDVKKISEKKEDQIEKDKPKNDNTKNDNTKEDKNQNDDNKTNTSIPKTPKNEVKNVITSSLLSSFNIFSAFSNSNTPNSKKNKYDEEEEKEEKEEEEENNKCNDKDDEDKNKSPQNEDNKNITNDNNDNNNNNVDKENNLKESIDNLGNVDTDNNIKRDVLNYNNIEENEQSREYILIEITKSICSIINLQQLMPVNTRLANPNLIYDPNYETIYSKWKTFLRKEQSSGNLISNCFSRDFLHTILLCNYVTIIEDLRKTAVKKKLKYFFLHLCLESGISINVALMLFINATKQSDKLQSLLPSETGLGYLHRDAGGAKEENMGIITFECITNDREPDHLIKLITLKNIFSRQLPKMPREYIVRLVFDRNHYTFCLLKKNTVIGGVCFRPYFEQKFAEIAFLAVTSTEQVKGYGTRLMNHLKEHVKKFGIEYFLTYADNFAIGYFRKQGFSQKISMPKERWFGYIKDYDGGTLMECYIFPNINYLRLSEMLYEQKKAVKKAIHFIKPQVIYKGINYFADNKGAALHPSTIPGLLEVGWKKETREITKKVQHKEVQLKDQILGVLDYLEKQQSAWPFLKPVSLSEAPDYYDIIKEPTDILTMRRKARHGDYKTKEDFGIELKRMFDNCRLYNAPTTIYFKYANELQTLIWPKYEAITDTAK

SEQ ID NO: 21 - DNA, 2034 bp, Plasmodium falciparum
atggctagtgcaaaaggttcaaaaccaaatttaccagaatccaatatcgctattggaattgatttaggtactacttattcttgtgttggtgtatggagaaatgaaaatgtagatattattgctaatgaccaaggtaatagaacaaccccatcttatgttgctttcaccgataccgaaagattaattggagatgctgctaaaaaccaagtagctaggaatccagaaaatacagtatttgatgctaagagattaattggtagaaaatttacagaatcatcagtacaaagtgatatgaaacattggccattcactgttaaatcaggtgttgatgagaaaccaatgattgaagttacctatcaaggagaaaagaaattattccatccagaagaaatttcttctatggtattacaaaaaatgaaagaaaatgctgaagcatttttaggaaaatctataaagaatgctgtcattaccgttccagcttattttaacgattcacaaagacaagctactaaagatgctggtacaattgcaggattaaatgttatgagaattattaatgaacctactgcagctgctattgcatatggtttacacaaaaaaggaaaaggtgaaaagaacattttaattttcgacttaggaggaggtacatttgatgtatcattattaactattgaagatggtatttttgaagtaaaagctactgctggtgatactcatttaggtggtgaagatttcgataacagattagtaaatttctgtgttgaagatttcaaaagaaaaaacagaggtaaagatttatcaaaaaatagtagagccttaagaagattaagaacacaatgtgaaagagcaaaacgtactttatcatcatctacacaagctacaattgaaatagattccttatttgaaggtattgattacagtgttactgtaagtagagcaagatttgaagaattatgtatcgactatttccgtgatactttaattccagtagaaaaagttttaaaagatgctatgatggataaaaaaagtgtacatgaagttgttttagttggtggttctacaagaattccaaaaatccaaactttaataaaagaattctttaatggtaaagaagcatgcagatcaattaacccagatgaagctgttgcatatggtgcagctgtacaagcagccattttatctggtgaccaatcaaatgctgtccaagatttattattattagatgtttgctccttatcattaggtttagaaactgctggtggtgttatgaccaaattaattgaaagaaacacaaccatacctgctaaaaagagtcaaatctttactacttatgctgataaccaaccaggtgtcttaattcaagtatatgaaggtgaaagagccttaaccaaagataacaatttattaggaaaatttcacttagatggtattccacctgcaccaagaaaggtaccacaaatcgaagttacattcgatatcgatgctaacggtatcttaaacgttacggctgtagaaaaatccactggtaaacaaaaccatattacaattaccaacgacaaaggaagattatctcaagatgaaattgatcgtatggttaatgatgctgaaaaatacaaagcagaagatgaagaaaacagaaaaagaatcgaagcaagaaacagccttgaaaattactgctatggagttaaaagctcattagaagaccaaaaaattaaagaaaaattacaaccagctgaaattgaaacatgtatgaaaactattacaaccatacttgaatggttagaaaaaaaccaacttgctggaaaagatgaatatgaagccaaacaaaaagaagcagaatcggtttgtgctccaattatgtctaaaatctatcaagatgctgctggtgcagccggtggtatgccaggaggtatgcccggtggaatgcccggtggaatgccaggtggtatgaatttcccaggaggtatgcccggagcaggaatgccaggaaatgccccagctggaagtggaccaacagttgaagaagttgattaa

SEQ ID NO: 22 - protein, 677 aa, Plasmodium falciparum
MASAKGSKPNLPESNIAIGIDLGTTYSCVGVWRNENVDIIANDQGNRTTPSYVAFTDTERLIGDAAKNQVARNPENTVFDAKRLIGRKFTESSVQSDMKHWPFTVKSGVDEKPMIEVTYQGEKKLFHPEEISSMVLQKMKENAEAFLGKSIKNAVITVPAYFNDSQRQATKDAGTIAGLNVMRIINEPTAAAIAYGLHKKGKGEKNILIFDLGGGTFDVSLLTIEDGIFEVKATAGDTHLGGEDFDNRLVNFCVEDFKRKNRGKDLSKNSRALRRLRTQCERAKRTLSSSTQATIEIDSLFEGIDYSVTVSRARFEELCIDYFRDTLIPVEKVLKDAMMDKKSVHEVVLVGGSTRIPKIQTLIKEFFNGKEACRSINPDEAVAYGAAVQAAILSGDQSNAVQDLLLLDVCSLSLGLETAGGVMTKLIERNTTIPAKKSQIFTTYADNQPGVLIQVYEGERALTKDNNLLGKFHLDGIPPAPRKVPQIEVTFDIDANGILNVTAVEKSTGKQNHITITNDKGRLSQDEIDRMVNDAEKYKAEDEENRKRIEARNSLENYCYGVKSSLEDQKIKEKLQPAEIETCMKTITTILEWLEKNQLAGKDEYEAKQKEAESVCAPIMSKIYQDAAGAAGGMPGGMPGGMPGGMPGGMNFPGGMPGAGMPGNAPAGSGPTVEEVD

SEQ ID NO: 23 - DNA, 999 bp, Plasmodium falciparum
atgaatgcagccgctgtagaacttattaatagattaaagaaagaagatgaaagcaataacaaatgttttgattgtggaatatccaaccccgattgggtgtctgtaaatcatggtatatttttatgtattaactgttcaggtgttcacagaagcctgggtgtacatataagtatagtaagaagtataaaaatggatatatttacagatgaacaattaaaatatatagataagggaggtaataaaaaatgtcaaacatatttagagaattatggaataagtgattttattccagaaagaaaatatagaactaaggcagctgatcattataggaaaatattaagatcgattgttcataatgtggatcctcctgctcctttacctttagatgaaggaaagagtttaattaattatggaagaaatgaaaatgttaatgaaaataataaaaatcaatattcaaatgaagaaccggattttatttcatcattaaatacatcagaaattatagaaaatgtaagtgccacattttccaatttaataaataaagcatcaagtatgacaactaatacaataaataatttaaatactaatgatttaatagaatcaactaaaggtacaataatcaatagtggaagctggtttactgagaaaactaaaaaaattgcagaaaatgttagtgataatccatggtgggctaaaggacaaagtaaaataaaagatgttacacaaaatgctagtggatggatatctaccatttcttcaacagtttcaagaacaaatagtaatttctttttttcaaataatgatactaatataaataatggaaacaatgaagatatcaataataataatactaacgttaatagtaatggtaatactactaataataataatgaacaagcacaaaataataataatgttaattttaattataatagttcaaatgcaaataatgaatatttaaattacggaatgaatgaaaataattcaacttttaattga

SEQ ID NO: 24 - protein, 332 aa, Plasmodium falciparum
MNAAAVELINRLKKEDESNNKCFDCGISNPDWVSVNHGIFLCINCSGVHRSLGVHISIVRSIKMDIFTDEQLKYIDKGGNKKCQTYLENYGISDFIPERKYRTKAADHYRKILRSIVHNVDPPAPLPLDEGKSLINYGRNENVNENNKNQYSNEEPDFISSLNTSEIIENVSATFSNLINKASSMTTNTINNLNTNDLIESTKGTIINSGSWFTEKTKKIAENVSDNPWWAKGQSKIKDVTQNASGWISTISSTVSRTNSNFFFSNNDTNINNGNNEDINNNNTNVNSNGNTTNNNNEQAQNNNNVNFNYNSSNANNEYLNYGMNENNSTFN

SEQ ID NO: 25 - DNA, 1194 bp, Plasmodium falciparum
atgatgagaaaattagctattttatctgtttcttcctttttatttgttgaggccttattccaggaataccagtgctatggaagttcgtcaaacacaagggttctaaatgaattaaattatgataatgcaggcactaatttatataatgaattagaaatgaattattatgggaaacaggaaaattggtatagtcttaaaaaaaatagtagatcacttggagaaaatgatgatggaaataacgaagacaacgagaaattaaggaaaccaaaacataaaaaattaaagcaaccagcggatggtaatcctgatccaaatgcaaacccaaatgtagatcccaatgccaacccaaatgtagatccaaatgcaaacccaaatgtagatccaaatgcaaacccaaatgcaaacccaaatgcaaacccaaatgcaaacccaaatgcaaacccaaatgcaaacccaaatgcaaacccaaatgcaaacccaaatgcaaacccaaatgcaaacccaaatgcaaacccaaatgcaaacccaaatgcaaacccaaatgcaaaccccaatgcaaatcctaatgcaaacccaaatgcaaacccaaacgtagatcctaatgcaaatccaaatgcaaacccaaacgcaaaccccaatgcaaatcctaatgcaaaccccaatgcaaatcctaatgcaaatcctaatgccaatccaaatgcaaatccaaatgcaaacccaaacgcaaaccccaatgcaaatcctaatgccaatccaaatgcaaatccaaatgcaaacccaaatgcaaacccaaatgcaaaccccaatgcaaatcctaataaaaacaatcaaggtaatggacaaggtcacaatatgccaaatgacccaaaccgaaatgtagatgaaaatgctaatgccaacagtgctgtaaaaaataataataacgaagaaccaagtgataagcacataaaagaatatttaaacaaaatacaaaattctctttcaactgaatggtccccatgtagtgtaacttgtggaaatggtattcaagttagaataaagcctggctctgctaataaacctaaagacgaattagattatgcaaatgatattgaaaaaaaaatttgtaaaatggaaaaatgttccagtgtgtttaatgtcgtaaatagttcaataggattaataatggtattatccttcttgttccttaattag

SEQ ID NO: 26 - protein, 397 aa, Plasmodium falciparum
MMRKLAILSVSSFLFVEALFQEYQCYGSSSNTRVLNELNYDNAGTNLYNELEMNYYGKQENWYSLKKNSRSLGENDDGNNEDNEKLRKPKHKKLKQPADGNPDPNANPNVDPNANPNVDPNANPNVDPNANPNANPNANPNANPNANPNANPNANPNANPNANPNANPNANPNANPNANPNANPNANPNANPNANPNVDPNANPNANPNANPNANPNANPNANPNANPNANPNANPNANPNANPNANPNANPNANPNANPNANPNANPNANPNKNNQGNGQGHNMPNDPNRNVDENANANSAVKNNNNEEPSDKHIKEYLNKIQNSLSTEWSPCSVTCGNGIQVRIKPGSANKPKDELDYANDIEKKICKMEKCSSVFNVVNSSIGLIMVLSFLFLN

SEQ ID NO: 27 - DNA, 2526 bp, Plasmodium falciparum
atgtcggcttttgaagagttggggttacatagcgatttgtgcgcagttttagaaaaaaatggcattgatttaccaacggctattcaacaagagtccattcctctgacattagggggaggagatttatgtgcttgtgctgaaactggtacaggaaagacgttaagtttcatattttcttctttacaaatagttcatgaattggttcgaaatataggtaactatgaagatgtgagtattagaaaaaataacaataacatggaaaataataatgatagtaatatttctaacattatagatgataatgataagaataagaagtcaagttacataaaaactattaataagaactcaaaagtaataattaaagacaatgaatgtatatgtaataataataataataataatagtaataatttccttttcgaagaagtaaaagttgactgtgaaataacgaatggattatatgcatacgaaattgaaatattatctaaaagttatgtgaatgttggtttttgtccatccattaaagaaacattaaaatataattatacctactgtagtaatggtaataaatataataataatagacaagaacattatggtgaatatttttcaaataatgatattataacatgtttaattaataaaaataataatactatatcttttaaaaaaaatgggaaatttttaggtaacgcttttaaaattttttataaatataatgatgttgcattttttccatatatatggggaaaatatttccatataaaacttcatttcgaaaatttaaaatatggtgatcgttcattacattttaatgaactatgtattttattaacttcaaattgtaatgataatgatactttaagtgataggaaaatatttttttcgtctgaaaatataagggacgaaaaaaattttaaattagagaaagcaaatatgcaaacacataattatcaaaataataatagtataataaacgaatatacacataattataatcaacaaaatttcaataataaaaaaaaactatactgtattgttttatgtcctactagagatttagcacaacaaacttataataattatttaacgtactctgaatgttttaataacccttctattaatattggaatattagtaggaggagaacaaagaaataaaggtcatcatatgaatgacgacggatcttataatattgttgtgggtacatgctttaaattaattgaatgtataagaaaaaattctataaaagttaatgatataagattattaatattagatgaagcagatgaattaataaataatgatgaaaaaacagttttagaaattaaagattcttgtatgaaatatggacatcgtgtgcaaactttatttttttctgctactttgcaagacaaaaatgttaaagattgtattaataaaataaccaataaaccaatatttgttgatttgaaatatggaaaaaatagtataccatcacacatatatgtgtgtctatattatgtcaatgatgaaaattcgaatttatcgtatattataaaagaaaatgataataataatcataacaaagaaatatataatatcctttataatgagaaattatatcatatgaatacaagggaattatatgaatatacagataaagtacatatcttaaataattcaaatagtaatttaaaaaaaaatgataaggaacaaatttctttaaatataaaaatgaataaactaaaaaaattagttcaaataattaatgtttttaatatgcaaaatggtattatattttgtcgaaccaatttagattgtgacaatgtatataattttttaaatgctgtaggtgatggtaaagcttataaaggtaccgttgaatcacttaaagaaaataaatattcctgtgttatattaaaaggaaaaatgtcaaatgacgaaagaaaaaacaatcttcaagctttcaaaaaaggtgaagtacgttttttaatatgtacagatgtcgctgcaagaggtattgatatacagaatttaagatatcttattattatgaccttgtctgataatattaatacattttttcataaaattggtagagtaggaagagatggaaaaaacagtttatgtattgtcttaagtgcagataatgagcaagaagaaaaggtatggtttcatacatgtcctagtagaggaattaattgttacaatagaaatttgaaagaaaataaaggatgtactgtatatattaaagaaagtgattatattaaaactattaatgatatgttagaagtacctatacatgtgttagattccaaatattattatgctgaaaatgttgttgatcctttaaattattttaaaaaacatccagtttctaataaaagcagaagaaataaaaatcaaaatgctaactccatttttcaagaatcatcccatatagatgtgttatcttcctttgcttcaaacattaatagtataaaaaaattacagtctgctattagttataagcattatgaattgttgaactttcaaatatga

SEQ ID NO: 28 - protein, 841 aa, Plasmodium falciparum
MSAFEELGLHSDLCAVLEKNGIDLPTAIQQESIPLTLGGGDLCACAETGTGKTLSFIFSSLQIVHELVRNIGNYEDVSIRKNNNNMENNNDSNISNIIDDNDKNKKSSYIKTINKNSKVIIKDNECICNNNNNNNSNNFLFEEVKVDCEITNGLYAYEIEILSKSYVNVGFCPSIKETLKYNYTYCSNGNKYNNNRQEHYGEYFSNNDIITCLINKNNNTISFKKNGKFLGNAFKIFYKYNDVAFFPYIWGKYFHIKLHFENLKYGDRSLHFNELCILLTSNCNDNDTLSDRKIFFSSENIRDEKNFKLEKANMQTHNYQNNNSIINEYTHNYNQQNFNNKKKLYCIVLCPTRDLAQQTYNNYLTYSECFNNPSINIGILVGGEQRNKGHHMNDDGSYNIVVGTCFKLIECIRKNSIKVNDIRLLILDEADELINNDEKTVLEIKDSCMKYGHRVQTLFFSATLQDKNVKDCINKITNKPIFVDLKYGKNSIPSHIYVCLYYVNDENSNLSYIIKENDNNNHNKEIYNILYNEKLYHMNTRELYEYTDKVHILNNSNSNLKKNDKEQISLNIKMNKLKKLVQIINVFNMQNGIIFCRTNLDCDNVYNFLNAVGDGKAYKGTVESLKENKYSCVILKGKMSNDERKNNLQAFKKGEVRFLICTDVAARGIDIQNLRYLIIMTLSDNINTFFHKIGRVGRDGKNSLCIVLSADNEQEEKVWFHTCPSRGINCYNRNLKENKGCTVYIKESDYIKTINDMLEVPIHVLDSKYYYAENVVDPLNYFKKHPVSNKSRRNKNQNANSIFQESSHIDVLSSFASNINSIKKLQSAISYKHYELLNFQI

SEQ ID NO: 29 - DNA, 7962 bp, Plasmodium falciparum
atgatgagtgatgcaaacaaaagacagctaagaacgagaagaaaaaaaactatgaattcattatattataatagtgattatagtaatgatataaatatagaagattctaaaagtagattaagtggtggcaagaaaagtgagggtagttctagtaaatcaaaagatgttatatcatcttatactaagaaatatagccttaataataaaaatcataaacatagtaaaaatattatgaatcataaaaatatgatttatagtgatgggtatatgaataatatgaatgaagacaatgtagacaatgaagaaatttgtgagaatcatttgtatgaggaaaataatgataataatatgaatgatgatatgaatgaaaataatataatagatgaagatgaaaatgaaaatacaaatcttgtaaatatagacgatgaaaatattaatgatgataataataatgaaaataatgataatattgaagacatgactaatgacatgaataataatgtaagtcataataatattattagcaatgataattcatataataatcaaatagatagtacatttcttaatatgaataataaaagaaaagatgaggaacatataaataatgatgatgaatatatacataaaagtaaagataagaaaaaaagtggatcattagtacatataaaaaatgaaaatacaaataaattagataatagtaataataataataataataataaaaataaaaaagatagtgtaagtgcaaatggatctaataagaataattgtaatacatctagtagtaataatcgtagtagacatgtacctaataataacgaaataaattatgcaaaaatggctgaaaaattacctcatgttgttggggttagatttgataagtcacaaaatagatggctatctggtatatgtattaatggacgatgtattaacagatatttcccagtatataaatttggatttgaagaagctcgtcggttagccattcaacataggaaaaattttgagacagctaatgtaggtcatttaaaaaaacaacagggtgaggctaaaacgtctcacttgaatttgttgaaccttaactcgcaaatacccaatgactttaaagatatccaaggaaaaaataaacttattttcaaatacctttcttatgactccattcaaaaagagtgggttgtaacatacgattatgacaacaaagttctcgttaataaatttcctgtagatatatatggatacaataatgcctacgaaatggctgtccattgtatcaataagcttaatatatgtaatcaggaaaagttgtgtaaaaatattaataaacaagagcattcaagaggattacaaggtgatttgttaaataattttaatgataataatattaataataataataatatgaatgataacaataataataatatacttgataataataataatttgattgataataataataataataatatttcgattgataatcacaatttgaatatatataataattccagtgaacataataatatgtgtgaagatttgagttcttttaaaataccccaaaacaaaataactaagttaattaattcagggcaatcaaattttttaatgaataatcaaaaatcagaaatggctttgaacgatattcttaataatgagaatatgatgaataatttaattcatgaaaagcaaaaactgaatataaaccataataatattaataaaaaattagaagaattagaaaatatgagaaaagaagatacaatgtttttaaatgacagttcttcttatttaagtaccaacgatataaaagtattgaatggtattaaaagattaaaaacagataattctccttttaataaacaggatgaggaatttttattaaattctaaaaatttgaataaatattctactatgcaaaacaataaatcttatgatattttaaatgattcaaattttaatatattagaaaatgaaggaatgttttctttaaatgataaaaaaggtataaataataacgatatgtcaaaaaatagaaatattacaaattctaattattttaaaccattccatgatgaagcagaaaataatatatatcagttattaaatggaaaatatttaaccaatgaggataaaagtgtacatatcaatcttttgaatagtgtaatgaagcaaagtactatgaacaaattatcaaatgaagaagatctttttgaaaaaaaagaaaaaaaaagaaaattaaagaataatatgcttgaacaaaaaggagatgatcaatttataaatatgaacaaaaggatcgatacgaacttagtgagtaataataataatataaatgcatttaacaacaacaataataataatattgtcaataataatattgtcaataataatattgtcagtaataatattgtcagtaataatattgtcagtaataatattagcaataataatattatcaataataataataatgtaatcccttttggtgatgaacattttgatgccttgtcattcgatgagtatcgaaaacgtattaatagtaaaaagagtaattattcaaatataggagaaaatgaaaaatacaagaaattagctaacgggttgttagataatggtgaaacactatctaaaaatttaaatgaattaaaaatgtatcatttggcaggaaaaaaagaaaaagataataatatgaacaatatgaataataacattttatataataataataatatgaaatattatacacataacgaacatcataagaatgaagaattaaaaaggagtcaacttaatgaaaatgtgaatcatgagaatatgctaaatttgaatcaaatgataagaaatatacttaataataatagtgtagataataatgaaaaaataataaaaggtataaatatcttaaaaaatatgactatgaatgataaatttaatttgattaattttaataatcaatgcatgaattattcgtataacaatatgatgaaaaaggaaaattatgttaaaaatatatataaaattattaataagggttcagaggattctattaattatgatgaatatttaactgtcaagttagaagttgaagatggtgaagaaaaagatcaaaatggtgaaaaaaaaaaaatcaacacatcagaggcatatcatgaaggaaaaatgaataaaaaacataaaaagaaaaaaaaaatgaagcaaaataaattagatgaagatattactgtaaataatggaatgataaatgaaggagacaatgacaaaattgaagatactaataaaaatgacgatatatcaaataattcagaagttacaaataaagatattataaatggtgaaagaaattcaaatgattctgaagaaaaggagaaggaagaaaaagaagattataatgaaaatacatataataatatgaatacagataataatacatcaaacagtaatgatgataatgaacaaataattaataacgaaaatgattatatattaaacaaaacaaataatgaaattaataaagaaataaatacatctataaatgaatttaatgatattgctttccaattgtgtccttggaaaaaaggtattcaatggaatttgttaaaaaaaatgtggacctgtaaattatgggataataaaggtaatgaaattacaaaaaatattcatataaaaaaaaaagaaggtattgatattggatataaatattgtataaaaattcgaacaaattcttttatattttatctatcaaaagaattaaataaatttccacatattcctgaaatatcttacgacttacaaaatcttcattttgttgtatcttataaagataatgaaaagaaaatatattcctttgaagatggaatttataaatcatttatagactgtatggaatatctaaacaaacaaaaaagagaatataatgaaaatatttatgatatatccaattttataaaagaaaaaaataatttggaattagatgatatatataaagaattaaattatttcgaatataatagaaatgtattaagtaatatttgtgaagaaacaaaaattgcatatagtataaaaccatggttaagaggtattatatgggaagataaattgaaaaaatggatagtcttttttaaagataaaaatgaaaacttgagaattagcttttttagtacatcagattataacgatgatgttattatgtcttataataaagcttgtgaatatttttcacaagttaaagaatcaaataattttgattccaattcagaggaatttgctcagtccattaaaaatgttattaaaaatgttcaatttgataaaataatagaacaacaaaatgacgcaaataataatgatcacaagaaaggtaatttgcaagaggaccatgatatacaaacaaattattataataaggtgacacaaggaaatgaaggggaaacaaataataataataataataatcaaggagaaaatatgaccgactctcaaattgtcttaaatacaaatgaaatccatgtccataatgtacatacattaaaacgtcctgaaggattatataatattgcagaaacacaatcaacccattttttaaaagataataatatttcgaatgagcacaaaagtatggaaacattttataatgaaaactcttattataatgatgatattgcttttctaaattatgctgatagtaatgatagtcttatttcaaaaggaatgtctcaatatttatcattaccatcaaaaaaaaagaagaaaaaaagaactactgaagatatatataaaagcgaaattgatgttttatcttatcaaaataatgaattatatagcaatgtaaaaaatgaaaactatgatgaaaatatttcagagaataataaaaaatatggaaaaaggaaaatggaattgaattttttaagtcacagtgaaaataatataaataatataaataataatacttataataataatgattatacaaatgatgataatcatagtagtaaggtgtattcttctgattgtgaaaagaatactaatcataacaaaaagacggaagataaatatgatcaagagaacaataaatatttttataataaagataaattattatttgaccacgaaaatggtacaattccaagaaatataaagaaggaatcaaacaatttaaacagcgaatataatttggattatttaaattctgaagatattaaaaataataaccatcaccatcacaataataataataatattattattaatggaccatcaagtgatggagaaacaataattttatcacagtatcacaaaaatgatgatgatgaagatgatggaaataatacagataattcaaaaatattaagaagttttgataagtgctcaaatgaaaatagtgtatgtataaataaaagtaatgagaaacttgaaaacattttagacggaggagtaaatatgagattaccaaaaagtgaaattttaaatcaagcttctagattacccaaattacaaggtatgttttttgataagagaagaaattattggactgttagtgtttgtggtttcagaaaatcatttggtgttaggacaagaggtgtatatcaagcatacaaattagcagctgaatttcgtaatcgtatattagaaaacaataaaggtaaatattatcctcaaagaagtacaagtatgtctagtaattataaatataatacaaagggtggatccataattattaaagatgaaaaattgaattatagtaatatatctgaaatgacatctgtagatgaagaatatgatccaaaaaaaaaaaaaagttcgttttcttctaataatattaataatattgataaggaattatattcattaaatgacaaagaaagtaatagtagtggattatattattcttttaatgtaaaagggaaaaccagttcaaatatatatgattattttttagataaaaaagaacatgactatttcgcaacaaataatagtagtaataatataaataataataataataataataataatgatataaataataatagtactaatgatataaataataatggtactaatgatacaaataataagaaagatccaaaaggtatacctaataattcatgttatgatgatcaatataataatattgaaaatgaagaggaagaagaagaaagggaaggggaagaagctgaaaggtggaatatatcagataaagtgaataataaaaataatgataataaaattcaaattggtaataatacttttggacaattaaaatatgatagtgctttagaatcaaaccttatcaattttataaacgaggtaggttcatctgattttttgaaagatgccaaaattaataataataataataacaataataataataataatattggtggaaataaaaagaatcaacatataaataataatattagcaatagtaatactttaaataatagcttaaatgttcaaaatatttcttctagtaatagtgctataagtaataatggagttataaataattattcacctacacatatatatgaagtagacaatctcaataatagtcaagattactatttaaaaaatgacgaaatgaaaaatgaattaaataaagtggaagatcaaaaaaataaaaaggatatttcaagcacaaatagtctactaaaacattttatgaatgatgatatattaataaataataaagtaaaacaacaacccttttttgatagtcacaacaattataataagttaggacacaaacaagtcaaaacatctgcttatacggaaagtgcaattggattaggctttagaaaaaatggatatattaatgattgtgacttagttaataataataataataataataataataacatgcatataaagaacaatggtgttatattaaataaattgatatcttctaaccacgatagtaaagataacagtaataacaatattaaggataaagatagggaagataataataaaaatatttataataataataatgatagatctattggtagttatgtaaacaatcttggtgtaatagaaaaccaatgtgagaatagtaaaggagcagatgaaaacacgaaaaattttaataataataaaacattaaataattatgaaccagaaaataagtcttataattacagtccagtgttagatgaaactctagaagaaagagatgtgagaataaatagagaggtaagcaaatgtaaatttgtagatggattaatatacgatgaagctaataaatgttttcgaataaaaattaatggttatagaaaagcatattctgttattagaagaggagtaaaagaagcttataaattaagtattgaatctatagaacaaattaaaagacaaacacaaacaaataattttaataataatgaacagtcacaagttaatacaaataatatgacacagatatataattcaagttctgaaaattcaagacatggatcatgttataattatcaacataatcataaaagtaaactagagaattcgaatgataatcctgaagaaaaatatgaccacatcaataatatgaccaatgtaggacatgaaaataaacagagcgctgaagaaagtttgtttccaatgttaaatgtagatgataaatattatgaacttcttaaaacatccattattatatgtctgaatgatatacttatgaattgtatacctcaagtatttcacctatacaaaaatatcaatacatcaaatgacataaaattagaagatatattatatactgaaaggaaaagaaaagaacagtccttaaaatatcatattgaatatacacaaaattctgtaggtgtgtcatcccttataccttacttgaaattatttagtaccgaaattttaaataacgttttaccatcagcacaatccttggaaatacaaagattaataattcattcgttggatatacaaacatataatacattatattaa

SEQ ID NO: 30 - protein, 2653 aa, Plasmodium falciparum
MMSDANKRQLRTRRKKTMNSLYYNSDYSNDINIEDSKSRLSGGKKSEGSSSKSKDVISSYTKKYSLNNKNHKHSKNIMNHKNMIYSDGYMNNMNEDNVDNEEICENHLYEENNDNNMNDDMNENNIIDEDENENTNLVNIDDENINDDNNNENNDNIEDMTNDMNNNVSHNNIISNDNSYNNQIDSTFLNMNNKRKDEEHINNDDEYIHKSKDKKKSGSLVHIKNENTNKLDNSNNNNNNNKNKKDSVSANGSNKNNCNTSSSNNRSRHVPNNNEINYAKMAEKLPHVVGVRFDKSQNRWLSGICINGRCINRYFPVYKFGFEEARRLAIQHRKNFETANVGHLKKQQGEAKTSHLNLLNLNSQIPNDFKDIQGKNKLIFKYLSYDSIQKEWVVTYDYDNKVLVNKFPVDIYGYNNAYEMAVHCINKLNICNQEKLCKNINKQEHSRGLQGDLLNNFNDNNINNNNNMNDNNNNNILDNNNNLIDNNNNNNISIDNHNLNIYNNSSEHNNMCEDLSSFKIPQNKITKLINSGQSNFLMNNQKSEMALNDILNNENMMNNLIHEKQKLNINHNNINKKLEELENMRKEDTMFLNDSSSYLSTNDIKVLNGIKRLKTDNSPFNKQDEEFLLNSKNLNKYSTMQNNKSYDILNDSNFNILENEGMFSLNDKKGINNNDMSKNRNITNSNYFKPFHDEAENNIYQLLNGKYLTNEDKSVHINLLNSVMKQSTMNKLSNEEDLFEKKEKKRKLKNNMLEQKGDDQFINMNKRIDTNLVSNNNNINAFNNNNNNNIVNNNIVNNNIVSNNIVSNNIVSNNISNNNIINNNNNVIPFGDEHFDALSFDEYRKRINSKKSNYSNIGENEKYKKLANGLLDNGETLSKNLNELKMYHLAGKKEKDNNMNNMNNNILYNNNNMKYYTHNEHHKNEELKRSQLNENVNHENMLNLNQMIRNILNNNSVDNNEKIIKGINILKNMTMNDKFNLINFNNQCMNYSYNNMMKKENYVKNIYKIINKGSEDSINYDEYLTVKLEVEDGEEKDQNGEKKKINTSEAYHEGKMNKKHKKKKKMKQNKLDEDITVNNGMINEGDNDKIEDTNKNDDISNNSEVTNKDIINGERNSNDSEEKEKEEKEDYNENTYNNMNTDNNTSNSNDDNEQIINNENDYILNKTNNEINKEINTSINEFNDIAFQLCPWKKGIQWNLLKKMWTCKLWDNKGNEITKNIHIKKKEGIDIGYKYCIKIRTNSFIFYLSKELNKFPHIPEISYDLQNLHFVVSYKDNEKKIYSFEDGIYKSFIDCMEYLNKQKREYNENIYDISNFIKEKNNLELDDIYKELNYFEYNRNVLSNICEETKIAYSIKPWLRGIIWEDKLKKWIVFFKDKNENLRISFFSTSDYNDDVIMSYNKACEYFSQVKESNNFDSNSEEFAQSIKNVIKNVQFDKIIEQQNDANNNDHKKGNLQEDHDIQTNYYNKVTQGNEGETNNNNNNNQGENMTDSQIVLNTNEIHVHNVHTLKRPEGLYNIAETQSTHFLKDNNISNEHKSMETFYNENSYYNDDIAFLNYADSNDSLISKGMSQYLSLPSKKKKKKRTTEDIYKSEIDVLSYQNNELYSNVKNENYDENISENNKKYGKRKMELNFLSHSENNINNINNNTYNNNDYTNDDNHSSKVYSSDCEKNTNHNKKTEDKYDQENNKYFYNKDKLLFDHENGTIPRNIKKESNNLNSEYNLDYLNSEDIKNNNHHHHNNNNNIIINGPSSDGETIILSQYHKNDDDEDDGNNTDNSKILRSFDKCSNENSVCINKSNEKLENILDGGVNMRLPKSEILNQASRLPKLQGMFFDKRRNYWTVSVCGFRKSFGVRTRGVYQAYKLAAEFRNRILENNKGKYYPQRSTSMSSNYKYNTKGGSIIIKDEKLNYSNISEMTSVDEEYDPKKKKSSFSSNNINNIDKELYSLNDKESNSSGLYYSFNVKGKTSSNIYDYFLDKKEHDYFATNNSSNNINNNNNNNNNDINNNSTNDINNNGTNDTNNKKDPKGIPNNSCYDDQYNNIENEEEEEEREGEEAERWNISDKVNNKNNDNKIQIGNNTFGQLKYDSALESNLINFINEVGSSDFLKDAKINNNNNNNNNNNNIGGNKKNQHINNNISNSNTLNNSLNVQNISSSNSAISNNGVINNYSPTHIYEVDNLNNSQDYYLKNDEMKNELNKVEDQKNKKDISSTNSLLKHFMNDDILINNKVKQQPFFDSHNNYNKLGHKQVKTSAYTESAIGLGFRKNGYINDCDLVNNNNNNNNNNMHIKNNGVILNKLISSNHDSKDNSNNNIKDKDREDNNKNIYNNNNDRSIGSYVNNLGVIENQCENSKGADENTKNFNNNKTLNNYEPENKSYNYSPVLDETLEERDVRINREVSKCKFVDGLIYDEANKCFRIKINGYRKAYSVIRRGVKEAYKLSIESIEQIKRQTQTNNFNNNEQSQVNTNNMTQIYNSSSENSRHGSCYNYQHNHKSKLENSNDNPEEKYDHINNMTNVGHENKQSAEESLFPMLNVDDKYYELLKTSIIICLNDILMNCIPQVFHLYKNINTSNDIKLEDILYTERKRKEQSLKYHIEYTQNSVGVSSLIPYLKLFSTEILNNVLPSAQSLEIQRLIIHSLDIQTYNTLY

SEQ ID NO: 31 - DNA, 1725 bp, Plasmodium falciparum
atgaatcatcttgggaatgttaaatatttagtcattgtgtttttgattttctttgatttgtttctagttaatggtagagatgtgcaaaacaatatagtggatgaaataaaatatcgtgaagaagtatgtaatgatgaggtagatctttaccttctaatggattgttctggaagtatacgtcgtcataattgggtgaaccatgcagtacctctagctatgaaattgatacaacaattaaatcttaatgataatgcaattcacttatatgctagtgttttttcaaacaatgcaagagaaattattagattacatagtgatgcatctaaaaacaaagagaaggctttaattattataaagtcactcttaagtacaaatcttccatatggtaaaacaaacttaactgatgcactgttacaagtaagaaaacatttaaatgaccgaatcaatagagagaatgctaatcaattagttgttatattaacagatggaattccagatagtattcaagattcattaaaagaatcaagaaaattaagtgatcgtggtgttaaaatagctgtttttggtattggacaaggtattaatgtagctttcaacagatttcttgtaggttgtcatccatcagatggtaaatgtaacttgtatgctgattctgcatgggaaaatgtaaaaaatgttatcggaccctttatgaaggctgtttgtgttgaagtagaaaaaacagcaagttgtggtgtttgggacgaatggtctccatgtagtgtaacttgtggtaaaggtaccaggtcaagaaaaagagaaatcttacacgaaggatgtacaagtgaattacaagaacaatgtgaagaagaaagatgtcttccaaaacgggaaccattagatgttccagatgaacccgaagatgatcaacctagaccaagaggagataattttgctgtcgaaaaaccaaacgaaaatataatagataataatccacaagaaccttcaccaaatccagaagaaggaaagggtgaaaatccaaacggatttgatttagatgaaaatccagaaaatccaccaaatccaccaaatccaccaaatccaccaaatccaccaaatccaccaaatccagatattcctgaacaagaaccaaatatacctgaagattcagaaaaagaagtaccttctgatgttccaaaaaatccagaagacgatcgagaagaaaactttgatattccaaagaaacccgaaaataagcacgataatcaaaataatttaccaaatgataaaagtgatagatatattccatattcaccattatctccaaaagttttggataatgaaaggaaacaaagtgacccccaaagtcaagataataatggaaataggcacgtacctaatagtgaagatagagaaacacgtccacatggtagaaataatgaaaatagatcatacaatagaaaacataacaatactccaaaacatcctgaaagggaagaacatgaaaagccagataataataaaaaaaaagcaggatcagataataaatataaaattgcaggtggaatagctggaggattagctttactcgcatgtgctggacttgcttataaattcgtagtaccaggagcagcaacaccctatgccggagaacctgcaccttttgatgaaacattaggtgaagaagataaagatttggacgaacctgaacaattcagattacctgaagaaaacgagtggaattaa

SEQ ID NO: 32 - protein, 574 aa, Plasmodium falciparum
MNHLGNVKYLVIVFLIFFDLFLVNGRDVQNNIVDEIKYREEVCNDEVDLYLLMDCSGSIRRHNWVNHAVPLAMKLIQQLNLNDNAIHLYASVFSNNAREIIRLHSDASKNKEKALIIIKSLLSTNLPYGKTNLTDALLQVRKHLNDRINRENANQLVVILTDGIPDSIQDSLKESRKLSDRGVKIAVFGIGQGINVAFNRFLVGCHPSDGKCNLYADSAWENVKNVIGPFMKAVCVEVEKTASCGVWDEWSPCSVTCGKGTRSRKREILHEGCTSELQEQCEEERCLPKREPLDVPDEPEDDQPRPRGDNFAVEKPNENIIDNNPQEPSPNPEEGKGENPNGFDLDENPENPPNPPNPPNPPNPPNPPNPDIPEQEPNIPEDSEKEVPSDVPKNPEDDREENFDIPKKPENKHDNQNNLPNDKSDRYIPYSPLSPKVLDNERKQSDPQSQDNNGNRHVPNSEDRETRPHGRNNENRSYNRKHNNTPKHPEREEHEKPDNNKKKAGSDNKYKIAGGIAGGLALLACAGLAYKFVVPGAATPYAGEPAPFDETLGEEDKDLDEPEQFRLPEENEWN

SEQ ID NO: 33 - DNA, 6648 bp, Plasmodium falciparum
atgaataaatattggttgtatattgcttatgtttatctattattaaacatactatcaaaatgtaataaaatagaaaataataataataaggtcaagaatttgaccgtttacaataatgatataggacaatattttaaaaaaaaggacatacaatgcaaacaccatatagaaataaatcaagactctaatcataatgaatattcctttttatcattaaaggcaagttcaatatttaaccagtactatgttgccaaattaattaatacccttttatatagaggatttcatttgaatgtctatttccataaaaatgtggctatgtatgaatccttttccagaacgaactttttcttttatttaaccatattaaacaaaaaaaatgtcaaaaaaattgttaagataatatccaaagcagaacgttcaagtaataaaagaaagtttaatgtattcaagaagtatttaatttctgagtttgattatcccaattttgaaatcgacgacaccgtaaaaaatgaaatgaaccaagcaattttagtatataaaaaagcaaaatctgattcatactggagtgttatggatgcattaaagaaggatggtttattattagctagaacctttttatctgtttcttttgttcaaagtcttagaggtattatcggtcttattaaccacaaattaatagatttatgttttactaatgcctatgtatttaaccacgtagcatcttttgataaacttattatgaataatatttttggtgttataatgtcatatgtatttaaatcacttttactctttttctacccattaattatacctttccgtggtgcatttgcctttgctatatctgctttttgtatcacacagttgggaaaaatagtatttgcaatatacaaaaatctcagacaattatatagaatatcatacagaaaaatatacagtattgtattaaaagttaaattaagaaatgaaccagaacttaaaaaatatgccatgaaattattatacggtgatgctttaattatgattacaaaaatatggaagttgtcatatgtaaatgtcagtgagcacttgaatggaaaaaatgtttatccaattttaaataacttatttgaaaaaaatttgggaacaggtttctttgattttagtaactccttattcaaatatgttatgaattacttagaggaaataaatttattaaatgccaaaagtgttgatgtagaaaaagaactcattttgaacagacataatttcaaactattacttaaaattttaaagattactaaaaagtccttattatatgaagagtcttatatgaagatatctgttgctaatttattaacaaaattttacaccttgattttagtaaatatagaacatataagtaaattaaatccaaaggaacatttctataatgatttagataatgaatttaaacatatatatcaagatcaaatgtttgaattatttatacaaaagatatcttcagatattgttagaaaaccatttatcaaaagaaatatcggaagaatagataaaggtagtatagaattaacattagcattaataaaagtaaaattattacattacaaaccaacattgaataatccatattccagtttatattttgatgagaatttaaaaaaacaattaaattatgcatttaaattaattattattggttctactagtataattgctagtcttgcaaactacggagaaagatatggtgttttaaaacaatgtccattagatattgttaagaatttaaatcaacaatgtgaatatgtttcttttgaaattaagaaattaatattcccaataaatatttttgtgaacttattaattccattatttttaccatatgatgatgtattagtagataaaaatataattgatgaagtcaaaaaattctttaacgttattatcgataccgatgattcttacttacaaaaatatatgaaaacaacaattaacactataagaaaatcaaaagatctagatataaataatgtaaattatgaagaagaaatggaaaaaattgtagttcaagaagcacataaagttattgaagaaattaacaaagaaagacgagcatctttcaaatttcaagattttgtagtcaaagaagattcagtagtattgtataataaaagtggaatccaatattcatttaaatttgatcatttaaatagaaaagaagattttatgcgtattataggtagttatcaatttaaaaatcccataggttatcaaacatcacaacttgtttttgaacctcaaaataatcatattggttctttaatggttggatcaaataaaaatacattcgatggaaaattaagtgtatgtcatatgtgttataaagaagatgatgattctttggttgttgatgcaatatttagtatcctctggtcttctggaattgatagatttagtgcctttatattcgcttccttcatcggtgctgtgaaacaaacttatcaccaaggtacctcctggaaacgtgctctcagtaatatggccccaaccgaattttacgaaatgcacaaaatttttatggataagagtgtttacggaaaagaaaaaagtcaaaattacttcttgaaaaacataagaaaatacagatttcaatttagtagaggctcattctctagaatgtttagaacgttcttagaaaattctttaaataaaattaatttctttaactcagaagaagccatcattattttagttatgtcaaccttatatgctctttacaaaaatattgaaaaattcgatattccattaaaagaaacctataaattatatcaacagaaattaattgaatcttattaccatgtagacaaatattcacaccattatgaaacatatactctaaatattagaagaaaaaaatacaatgcacttgtcaagagtgaacatgaaaaggcacaagaagctagccaaggagaaggtaaagacgaagcagaaaatgctgaattaaaaaaaagagttgaaaagagaattaactttaatgatatacaattaactatggaagatgaagttgtaaggaatacaaaatatttacaattagaattacaagcaaaaccacaagaaagagaaaaaatcatacaatatttaacatataaatataaggaaataccaaatcatgaaatgttcccacatttaccacaccaatgttatttcttattatattataattatgaaccctttttagaaaaaaaccttcatggtctagaaggtgttgttagtaaaattacacgaaaatcagtcttaagtagatacttaaaaaatattaatttaatacaaccagagaaaacgagatttgcatctataaaattaaaagatttaatcaatatactttgtggtacacacatgtttttgaaaaaagaacatatcacatttgatgaaatatataaatatgaaaattcaaatgatgctttgaaacatcttcttatcattgttgcattattaagaattgaaaagagaactaaccgatattcttggacaacatatttaactttacaaaaacaattagatgaaagaaaaagatattatgatacaccatttaaatatttatttttaaaaataagcaaagtaagaagattttatggaagcgcaaaaaaaaaaatgttattaggatttggtaaaaaatttaaaggagttagatttttaaatatattaagatataccagattctttgaaattatggaatatgctgaatcaattaatgaattttatccatattgttatattaaatttgaagatgtattaacattctcaaatgtattttataaatttaaatattctcttttaagatatacaacaagtaaacaatctgttagaaatgttgtgaacaatttcaatttgtctccacaaacaacaggaaacaatgaaaacttattattaagaatatatagatttattgaattaattattaaaaagaagtataatgttgatatacagcatgttagaaaagatgataaagattttaatagacatgcatataataagaatgaatatatattaaatgatataaagtttaatcctaatattgaacaatatttaagacaattaactggtttcattaaacttttaacagatatgaaatttactaatttcttattcttaagaaacttatattactttgttaaattttatgcagtaacgggtgatttaacttattcaataaataattcttctatatatttatgtagtagaaattatttagaatttatattaaattccattattgaatttgaaaattttaaaaaatttatggttaagattaaagaaaaatttgatattgaaaaatatccaattgatccatataatttccaaacagaatgttattctatagatagtgtcaaaacatatagattctttttaagtgatttagataaattaaaatcatatcaagatatagaaaacttacagaatgtctcatcattttataaagattacttatatatgggattattttatgaaaacttagatgtcagaaatttaaatgtatattataatttcaataaaaaaaaaaatcaagatcataaagcacatggatcaaatgtattccttgatgggggtctttcattaagtaaaaatatgtcatttagtgatataaatgatttaagtgaatctattcaaaattatttatatttagaaaaatttttagctgatagtaatataccttctattccatatcaaggattttcggttagacgtgtaaatgatggtatgcatgtaacatataataatagatcaactacaccaccactttataaagataatgttttagatcaattcgaattagtaggaaaatcattaattagtgaatatttccaaaaagtcaaatgttcatttattcaatatccattcaatttatattattggctagtccttaatccaggaaaaccaaatataagcttaagtagtaaaaccggtctaattaaagaagatgatttaatacctaaaaccgttgaagaaaaattaaaggaagaagaagaacatgatattaaaattgttgaaaatatattatctgaagatatctttgattttaaagataaatcagatgatgatcaaagtacaaccgctgatgtactttctacagacacagatgattcagaaactgacgctgaaaaaacatcaaacaattcaaataccctacacaaaaaagaaacaccagcaatgaaatataatatgaatatagcacaagatgaaattaatagacaaaatgatgtatctaaaaatacaacatatgcagaaaataatgaatacacatctgaaaatataactaaaccatcagatcaaaatacagaaaactatggaacaaaaatgccctctccatcattcatacaaatagataaagttaaccaacaagatcaacaaaatgatgctcatatagaaagttctaaaaatactcaagaaaatcttaactatgatgataacactaatatgtatgaagaaaataaaaatgataagaaaaacaaaaaattaaataataatacaaaagaaataagtttccttgaaagaagagaaactaatcctataccatttagttcaaatatgattaatgaaaaaaataaagaagctcataaagaacactatggaaatttcaatagaccatataatatatatgtacctaaaaaagatatcttcagaaatttccatctagttgtaaaagtagtacatgcattaatatccttaaataaattctccatggttagtccagatacaatattaaaaaaaggtatagaatccatgaaaaaaaaacactcactcaaaatgattaaaaatataaatccatttatacataaaatgatacttgacatgaatgaaaccatacaaaaattaaaatccgatagtgaaaaagcatatggtggaccaaaagcagatattatatctttatataaaattgtggaattccaattatttaatcaatatattatatatccaccattaaaaagattaaccaaaaaagaacttaaatatatacttgatgttgttaaccaaggatattatttctacctaaaaaatgttatcacaaaattaaaaagagaaaatctacaaaaatcgaaagttgtcaaaatatttaataatttccaagaattctctaatttattagatgatgatggtgtagataaattatataatatatttactgaaacatttaaatgtaaaaatattaaatgttttgatcttttattccaaggattcttaaccgaacaatataataacattgtctatcgttatacacatgatcatgatgctatgaactcatataatgataacatatttaataataaagaattattaaacaaaatatttagaagagcatatgacaactattttattacacctgttaaaaacaatcaaccaaaaaaactcatatctttagaaaaaccatcattagaacaaccagtattgacgttagaagaatttgcatatggattccatgaatttggaaataaaattgaaaaatggagatcaatgcttaccctattcaatataagacatatatatattaatatatgccacatgctattaagtgttaaacatagtatacaacgatcacacagagtttttatgcacaaatttggtttcttcggtatcttcagaagaaagagggaaatttacataccataa

SEQ ID NO: 34 - protein, 2215 aa, Plasmodium falciparum
MNKYWLYIAYVYLLLNILSKCNKIENNNNKVKNLTVYNNDIGQYFKKKDIQCKHHIEINQDSNHNEYSFLSLKASSIFNQYYVAKLINTLLYRGFHLNVYFHKNVAMYESFSRTNFFFYLTILNKKNVKKIVKIISKAERSSNKRKFNVFKKYLISEFDYPNFEIDDTVKNEMNQAILVYKKAKSDSYWSVMDALKKDGLLLARTFLSVSFVQSLRGIIGLINHKLIDLCFTNAYVFNHVASFDKLIMNNIFGVIMSYVFKSLLLFFYPLIIPFRGAFAFAISAFCITQLGKIVFAIYKNLRQLYRISYRKIYSIVLKVKLRNEPELKKYAMKLLYGDALIMITKIWKLSYVNVSEHLNGKNVYPILNNLFEKNLGTGFFDFSNSLFKYVMNYLEEINLLNAKSVDVEKELILNRHNFKLLLKILKITKKSLLYEESYMKISVANLLTKFYTLILVNIEHISKLNPKEHFYNDLDNEFKHIYQDQMFELFIQKISSDIVRKPFIKRNIGRIDKGSIELTLALIKVKLLHYKPTLNNPYSSLYFDENLKKQLNYAFKLIIIGSTSIIASLANYGERYGVLKQCPLDIVKNLNQQCEYVSFEIKKLIFPINIFVNLLIPLFLPYDDVLVDKNIIDEVKKFFNVIIDTDDSYLQKYMKTTINTIRKSKDLDINNVNYEEEMEKIVVQEAHKVIEEINKERRASFKFQDFVVKEDSVVLYNKSGIQYSFKFDHLNRKEDFMRIIGSYQFKNPIGYQTSQLVFEPQNNHIGSLMVGSNKNTFDGKLSVCHMCYKEDDDSLVVDAIFSILWSSGIDRFSAFIFASFIGAVKQTYHQGTSWKRALSNMAPTEFYEMHKIFMDKSVYGKEKSQNYFLKNIRKYRFQFSRGSFSRMFRTFLENSLNKINFFNSEEAIIILVMSTLYALYKNIEKFDIPLKETYKLYQQKLIESYYHVDKYSHHYETYTLNIRRKKYNALVKSEHEKAQEASQGEGKDEAENAELKKRVEKRINFNDIQLTMEDEVVRNTKYLQLELQAKPQEREKIIQYLTYKYKEIPNHEMFPHLPHQCYFLLYYNYEPFLEKNLHGLEGVVSKITRKSVLSRYLKNINLIQPEKTRFASIKLKDLINILCGTHMFLKKEHITFDEIYKYENSNDALKHLLIIVALLRIEKRTNRYSWTTYLTLQKQLDERKRYYDTPFKYLFLKISKVRRFYGSAKKKMLLGFGKKFKGVRFLNILRYTRFFEIMEYAESINEFYPYCYIKFEDVLTFSNVFYKFKYSLLRYTTSKQSVRNVVNNFNLSPQTTGNNENLLLRIYRFIELIIKKKYNVDIQHVRKDDKDFNRHAYNKNEYILNDIKFNPNIEQYLRQLTGFIKLLTDMKFTNFLFLRNLYYFVKFYAVTGDLTYSINNSSIYLCSRNYLEFILNSIIEFENFKKFMVKIKEKFDIEKYPIDPYNFQTECYSIDSVKTYRFFLSDLDKLKSYQDIENLQNVSSFYKDYLYMGLFYENLDVRNLNVYYNFNKKKNQDHKAHGSNVFLDGGLSLSKNMSFSDINDLSESIQNYLYLEKFLADSNIPSIPYQGFSVRRVNDGMHVTYNNRSTTPPLYKDNVLDQFELVGKSLISEYFQKVKCSFIQYPFNLYYWLVLNPGKPNISLSSKTGLIKEDDLIPKTVEEKLKEEEEHDIKIVENILSEDIFDFKDKSDDDQSTTADVLSTDTDDSETDAEKTSNNSNTLHKKETPAMKYNMNIAQDEINRQNDVSKNTTYAENNEYTSENITKPSDQNTENYGTKMPSPSFIQIDKVNQQDQQNDAHIESSKNTQENLNYDDNTNMYEENKNDKKNKKLNNNTKEISFLERRETNPIPFSSNMINEKNKEAHKEHYGNFNRPYNIYVPKKDIFRNFHLVVKVVHALISLNKFSMVSPDTILKKGIESMKKKHSLKMIKNINPFIHKMILDMNETIQKLKSDSEKAYGGPKADIISLYKIVEFQLFNQYIIYPPLKRLTKKELKYILDVVNQGYYFYLKNVITKLKRENLQKSKVVKIFNNFQEFSNLLDDDGVDKLYNIFTETFKCKNIKCFDLLFQGFLTEQYNNIVYRYTHDHDAMNSYNDNIFNNKELLNKIFRRAYDNYFITPVKNNQPKKLISLEKPSLEQPVLTLEEFAYGFHEFGNKIEKWRSMLTLFNIRHIYINICHMLLSVKHSIQRSHRVFMHKFGFFGIFRRKREIYIP

SEQ ID NO: 35 - DNA, 1728 bp, Plasmodium falciparum
atgtttattgctgttgtgggttgtactcacggagaattagatttaatatactcgactctcgaaaagatagaagaagaaaataaaataaaggttgaccttttaatttgttgtggtgattttcaaagtgtacgatataatgttgataatgagtgtttgaatgttcctgcgaaatataaaaaagaacaaaatgatttcgtagattattttacaggaaaaaagaaggcgaagatcttaactatatttgtaggaggaaaccatgaggccatgaatgttttgaaacagttgtattatggtgggtgggttgctcctaatatatattatttaggatactctagtgttcataatattaataatttcagaatatgtagtttaagcggtatatataaaaaatatagtttttttaagaaatattatgaatcctatccttatacagatattacaaaggttagcgcatatcatataagaaaatatgaaatagaaaaattaaaattattaaaaaataacgttgatattgttgtaacacatgattggccaaataatattgaaaaacatggagatgtacatgacttattaagaagaaaatatcattttcaatctgacgtatataataatacattaggtaatcctcataccgaaatattattaaataaattaaaaccttatttctggtttgcatcacatttacatgtaaaatattcggcattgtatatccacaatgatcagaaacagtatactagatttctttctctagataaggctcaagaatataaacattttatacaaattttaaatattgtaaagaaaaaggattcttctatacatttaaattttgatcatgttcctaaggtgttgttaccagaaccaggtagcaaaatggacattcaaaatgatgcacagcctaatcatgatttggagaattgtcctaatacaaaaacaaatacatgcaacaataatgatcatcataatgatgattctattaatttagattatgatcatgaaaaggcattatacgaactagacagaaatatgcaactggatcaggaaaaaaatgacgaaaaaaatgttgacaaaagtgcagataaaaatgtgtgcaataaagacatatccttagaagataaaaatcaacataataataacaataataataatgatgatgatgatgatggtgtagatatacaagctgatacatcaacaaatgttgctgatcaaaataataactctgttccaacaaatttaaaagaaaatgaggaagaatctttaaatgatcaaaatgaaaataaagatgaagaaactagccaagatgaaaatataacagatgaaaaaaaaaaaaaaaaattttatttatgttatgatatagaatggctagctatagtaaaagcaaatcatcatctcatttctgcctcatgtgataaggattataatttagaaacactaacatatccaacaaaagaagatttcgattttgtagagaataaacttaaagagttggataataaaataacaataaaaggtaaagattattattgtgtaaatggttataatacgccaaattataaaaacctccaagaacaaagacagttatttttaaaacgtttcgaattagaggagttaagtatatacacagagtcagagttgaatttttttgctgaagaaatgaaaacattggaaaaaatgaatactgatattcataatgaggaggataagaatgaatgtactatagaagcatag

SEQ ID NO: 36 - protein, 575 aa, Plasmodium falciparum
MFIAVVGCTHGELDLIYSTLEKIEEENKIKVDLLICCGDFQSVRYNVDNECLNVPAKYKKEQNDFVDYFTGKKKAKILTIFVGGNHEAMNVLKQLYYGGWVAPNIYYLGYSSVHNINNFRICSLSGIYKKYSFFKKYYESYPYTDITKVSAYHIRKYEIEKLKLLKNNVDIVVTHDWPNNIEKHGDVHDLLRRKYHFQSDVYNNTLGNPHTEILLNKLKPYFWFASHLHVKYSALYIHNDQKQYTRFLSLDKAQEYKHFIQILNIVKKKDSSIHLNFDHVPKVLLPEPGSKMDIQNDAQPNHDLENCPNTKTNTCNNNDHHNDDSINLDYDHEKALYELDRNMQLDQEKNDEKNVDKSADKNVCNKDISLEDKNQHNNNNNNNDDDDDGVDIQADTSTNVADQNNNSVPTNLKENEEESLNDQNENKDEETSQDENITDEKKKKKFYLCYDIEWLAIVKANHHLISASCDKDYNLETLTYPTKEDFDFVENKLKELDNKITIKGKDYYCVNGYNTPNYKNLQEQRQLFLKRFELEELSIYTESELNFFAEEMKTLEKMNTDIHNEEDKNECTIEA

SEQ ID NO: 37 - DNA, 2739 bp, Plasmodium falciparum
atgaatttcctaatattagttgtattaattaagatggttgtatgtaaaattattaattatgttagaagtgattataattttatgctgtcatttttaaggacgagaaaaatatttagtcataaaaagatttatttcaattttaaagtttctaagaatattacaaagaattcatcatctaatagttatagtgatatattaaaatgtttctcttttccaagaaaaggaactaacgataagacgaaggaaaatgaaacatttgaaaaaggagaagtaaaagaagaagaagaagaaaaagataaaaacgtcaaaaggaaaattattaatgaaagtagtaaaaataaaagagctaaagttaagaatgaaaatgatgttataaaaaaagggtcgttatttaattgtgttgtaagagaagatgaaaaagtgaatgatttgagctcacctaaatttaatcctgtacattttaatataaatgatttatatttatctgaaaaagataaagaaaaacataaatttaaagactccttattatttacctttttaacaaatgcatttaatcaaatagaagaattaaaaggtagtggtacaggaagtaaaaaaaatgtatctattatattatcgaatatatttagggttttaatatattatagccctaatgacttaataccagctgtatatataaccttaaataaagtagctcccgattatttaaatgtcgaagctggtgtaggtgaagccttgatattaaaaacgatgtctgaagcatatagtagaacggaaagtagtataaagaaggatttacaacaaattgaagatttaggaataatagcggagaattgttcttgtaaaatgagaacaatatttccgttacctcgcttaactatacaatctgtttttcatgagctaaaaagtatacctaaccttataggatcaaattcacaacagaagaaaagggaagtcataaagaaattgttagtaagtgctaaaacatctgaagctaaatatattgtaagatttttacaacagcgtttaaggataggtgtaaattctgcaacggtcgtacaagctttgtcatatgcctttatattaacaagacctagtatacctgatgatattataaaaagagggaaagaaattaatgagaatttgattaatggtaaattggatggtactaataatttaattaataaatctaataacaagacggaagagtggctaacccaatcaggtgataggaattgtataaaggaagaaaatttaaatgatgaattattatcaaaggatgatataaataaatgtgaaaacatggattcattaattaatgagatacgtattcgaaatgaaaaaataaacaaaccgaatattttttataaccttattgaaaaggtgggtgacacacgattattaccattattttttaaagaattaaaaaatatatattgtgaagaaaataatgatattgatatatttgaatgtatggaaaaatcagttaagagtgctttatgtgaattacccaatatcgaaataataatacaaaatttattaaatggtgatgatatgaataccttaagtaaaaaatgtactgttaaaacaggtattcccgttcaacctatgttagcaaaaccaactaagggtgttcaagaagtgttggatagatttaataatgttacatttacttgtgaatataaatatgatggtgaacgagcacaaatacattatatagataaagataatataaaaatattcagtcgaaatttagaaacgatgactgaaaaatatccagatgttatacaaataataaaggatcaaataggagagaatgtaaaggaatgtattatagatagtgaagttgttgcttatgatatagttaataataaaatattaccattccaagtcttaactactagaaaaagaaaagatgtagatatagaaaatattaaagtgaaagtatgtctttttccatttgatttaatatgttgtaatggtataccagtaattaaagaacctttagctgttagaaggaaattattatattctttattaaagtcaaaagatggggtgttatcatatgctacccattctgaaatgaataatattgaagatattgatatgttcttacaagatgctatcgaaaataattgtgaaggtttaatggttaagactttagtagaaaatgcatcctatgaaccttctaggagatcattaaattggttaaaggtcaagaaagattatgttgaaggtctttcagattcggttgatttagttccgatagctggttattatgggaaaggaaaaagaagtggagtatatggagcttttgttttagcagcttataattctgaaacggaaaattttcaaaccgtttgtaaggcaggtacaggttttagtgatgagatattaagtacattatatgaaacattaagtgaaaaaattataccaaataaaaaatcgtattacgaagtatctgacaaattaaatcctgatgtgtggtttgatgctcactatgtatgggaggttaaggcagcagatttatctttgtcacctgtacatacagcagctattggtatatatgcagatgataaaggtattggtttaaggtttcctcgatttttacgtttaagagaagataaaaatgcagaacaagcaaccactacacaacaaattgtagatttttatgaggcacaatttagtagtaataaaaataaaaatattgattataatgatgatactgaaagtgaataa

SEQ ID NO: 38 - protein, 912 aa, Plasmodium falciparum
MNFLILVVLIKMVVCKIINYVRSDYNFMLSFLRTRKIFSHKKIYFNFKVSKNITKNSSSNSYSDILKCFSFPRKGTNDKTKENETFEKGEVKEEEEEKDKNVKRKIINESSKNKRAKVKNENDVIKKGSLFNCVVREDEKVNDLSSPKFNPVHFNINDLYLSEKDKEKHKFKDSLLFTFLTNAFNQIEELKGSGTGSKKNVSIILSNIFRVLIYYSPNDLIPAVYITLNKVAPDYLNVEAGVGEALILKTMSEAYSRTESSIKKDLQQIEDLGIIAENCSCKMRTIFPLPRLTIQSVFHELKSIPNLIGSNSQQKKREVIKKLLVSAKTSEAKYIVRFLQQRLRIGVNSATVVQALSYAFILTRPSIPDDIIKRGKEINENLINGKLDGTNNLINKSNNKTEEWLTQSGDRNCIKEENLNDELLSKDDINKCENMDSLINEIRIRNEKINKPNIFYNLIEKVGDTRLLPLFFKELKNIYCEENNDIDIFECMEKSVKSALCELPNIEIIIQNLLNGDDMNTLSKKCTVKTGIPVQPMLAKPTKGVQEVLDRFNNVTFTCEYKYDGERAQIHYIDKDNIKIFSRNLETMTEKYPDVIQIIKDQIGENVKECIIDSEVVAYDIVNNKILPFQVLTTRKRKDVDIENIKVKVCLFPFDLICCNGIPVIKEPLAVRRKLLYSLLKSKDGVLSYATHSEMNNIEDIDMFLQDAIENNCEGLMVKTLVENASYEPSRRSLNWLKVKKDYVEGLSDSVDLVPIAGYYGKGKRSGVYGAFVLAAYNSETENFQTVCKAGTGFSDEILSTLYETLSEKIIPNKKSYYEVSDKLNPDVWFDAHYVWEVKAADLSLSPVHTAAIGIYADDKGIGLRFPRFLRLREDKNAEQATTTQQIVDFYEAQFSSNKNKNIDYNDDTESE

SEQ ID NO: 39 - DNA, 2046 bp, Plasmodium falciparum
atggcaattaataatgaagaagtaaatacgatgaatgaaactgagctaaagagaatatattacgagaattttattgaagaattaaatgatgaagaattaatgtataagaaaacagtcgaagatttattttatatatacaaatcttttgggtttatatattccataataaaaaaggctaatttattattaagtaaagaaaatttcgatacctttttgaaatcattagtaagcttcattgatgaactctttttatataatccttctttatttaacaatgaactaaataatggattgaatgtaccatatgtaaataaagacaatatacttccgaataagaaaagaaaatatccggaggacacaggttcgaatgatataaataatatgaatgatatgaatgatataaataatgtgaataatttgaataatttgaataatttgaacaatatgaacaatatgaacaacgaaaagacaaacgaacatacttcatttatgaataacatgtcaaaaacctatgttgaagaattaatcaaagatattaaaaatatagatgataattttagtgaaactaactgtagtgattttttatatattgtaaaaaatattttaaaaatgaaaaataccagtgatattgaatgtgttaagaatagatttgagaaaataaaaaatgtattaaacataggaaaaagtatattcgacaaaaaagatatactttatgatatgaatgatcataaaaagaaagcacatgaatatatagatgatatgtatacaaaattaaataatatcgaaccaattattatttctattatatataaacaaaatttttggtataataatatattaaataaatctgaatatgatagtattaattctatactaaatctaaatattgatgtagctaatgaaaaaatcgaagaagtatatacagaagtattattattattaagtgaagaaatgacacaaaataaagatttacattttgctaaagaaaaattagaaagattaaaaacaagttatgatgcagaaattcaacgtaaactacaacaagaaatggaattaacgaaaaagttggatgataaaagaaaagctgttcaatttattattgatagatataatgaatatacatggtttgataaaaattctcctaaaaaacattcattttatatattaggtataaatccaaaaaatattacagaagaacaattaaaatcatttggcaagagattaaaacatattttacatcctgataaagaaccagatactgaatggaagaaaaaagcagaatctgcttttaaagaagcttctttagctatcttaggttgtcaacaagaatttaaaacaaaaattttaaaaaatttagagcctggaccaatggctccatatttaacactaataggtattgaaagcacaacaaatgaatctaatgaaaaggataatattaataaaaataaatcatctaatttaaatgacaataataataataatttaaatggtacaacaggattacatccttattatccaacacaagtatattatcccaaatgtgaattgaaatgtgtagaccaaaaaattggtactgtacttattgatattaaatgtcctgtacaactaggtgttattaaaaaagttatattatatgtacatagaccaatatatggtaatgaaccaatgaatttaataccagatgatacatatctatcttataaaaaagaacataatgttaatgttaaaaatttaaatcaatctattgaagttcgagttgattatgttcaaccactagaaattgcgtcttctacaaaatattatataggtatccaattaatagctgaaaggggaaatacaatgataaactggaattctataaatataaccttacataaatttagtaataagaatataataaaaaaattgttaacatcttttaaaaatgcaacctttataaaccaagcacaattaaataatactttagcaaatgataataaggacgaaatgaccaaatttttgaatgagtgtatagcagcagcgaagttatgggcacaaacggtttag

SEQ ID NO: 40 - protein, 681 aa, Plasmodium falciparum
MAINNEEVNTMNETELKRIYYENFIEELNDEELMYKKTVEDLFYIYKSFGFIYSIIKKANLLLSKENFDTFLKSLVSFIDELFLYNPSLFNNELNNGLNVPYVNKDNILPNKKRKYPEDTGSNDINNMNDMNDINNVNNLNNLNNLNNMNNMNNEKTNEHTSFMNNMSKTYVEELIKDIKNIDDNFSETNCSDFLYIVKNILKMKNTSDIECVKNRFEKIKNVLNIGKSIFDKKDILYDMNDHKKKAHEYIDDMYTKLNNIEPIIISIIYKQNFWYNNILNKSEYDSINSILNLNIDVANEKIEEVYTEVLLLLSEEMTQNKDLHFAKEKLERLKTSYDAEIQRKLQQEMELTKKLDDKRKAVQFIIDRYNEYTWFDKNSPKKHSFYILGINPKNITEEQLKSFGKRLKHILHPDKEPDTEWKKKAESAFKEASLAILGCQQEFKTKILKNLEPGPMAPYLTLIGIESTTNESNEKDNINKNKSSNLNDNNNNNLNGTTGLHPYYPTQVYYPKCELKCVDQKIGTVLIDIKCPVQLGVIKKVILYVHRPIYGNEPMNLIPDDTYLSYKKEHNVNVKNLNQSIEVRVDYVQPLEIASSTKYYIGIQLIAERGNTMINWNSINITLHKFSNKNIIKKLLTSFKNATFINQAQLNNTLANDNKDEMTKFLNECIAAAKLWAQTV

SEQ ID NO: 41 - DNA, 2670 bp, Plasmodium falciparum
atgataattattgtaatatttctcctttctatgtttttttttgagaataaaacgtattgttttatttctaagataaatataaaaaacttacgacataataaaaataataataataaatatcatttatttgcctctagagaattaagaaagattagctcctttgtgttggataatagaatattatttaataagcaaaagataagaaaaagaaaatttaatttttttaatgtttattctaacaaaatgagtgatatggataatataaaggaacaaaaagagaatgatggatgtggtagtttggaagagcttatagaaagatacgtttgtgaaatatcatccttgatagaaagaaatgaatgtattaaaggaatagacgatgaagatttaaaaaaggaatttatggaaaatgaaaaattattacaagataaaaaaatgaaattaaaagatttatatggtaaacctagtgaagaattaaaattagttgaaaatcgtaccaagttagaaaatttagtaaaaagaaaatttttttataccaactcatttgaaatatatggtggagcttctggtttatttgattatggtccttctggatgtttattaaaatcagaattagagaatttatggagatgccattttatatattatgatgagatgttagagatatcaggttcttgtgtaactccttatcaagtattaaaaacatctggacatgttgatagatttactgatttaatgattcgtgatgtagtaacaaatgattgttatagggcggataaatacttgggtgattttctaaaagctaaaattgaagaattaaggaaaaagaatacaaagggggatgaacatgttgatgaaaaagaaaagaagcaaaagagagatgatgacataaacgagaataaggaaaataataaaaataatgaaaataataaaaatgatgaaaataatgaaaataataaaaatgatgaaaataacaaaaataatgataataataataataataataatagttgtaattataattgtgatatggttggtgggctgcacaatggcaacgaaaggttaatacaaaaaatcgaattaatattaagaaaattagatggtatgaatgaagaagaaattaaagaaattattaaagagtataatataaaatcaccattaaaaaatgatttatcagagcctttcccttttaatttaatgtttcaaacaaaaataggaccaaaggatgataatacagaagataaaaataaggagaaatgtaaaaatgtgtctaataataaaaatttaaatagtacgaatacaaataataatatgaataatgttgcttttttaagacctgaaacggcacaaggaatttttgttaactttaagaagcttttagaatataacggtgggaaaacaccttttgctggagcacaattaggtcttggatttcgtaatgaaatatcaccaagaaatggcttgttaagagttagagaatttcagatggctgaaatagaatatttcgtgaatcctaaaaaaaagaatcatgagaaatattatttatttaaatatttaatgttaccattatatcctagagataatcaattaacagatggtgtggtaattaaaaacatgactttagaagaagcagtagaaaaaaacattatagcaaatgaagctttagcatacttcttagcaagaacttatttatttttattaaaatgtggaattaataaagatggtatacgatttcgacaacatttaaaaactgaaatggctcattatgcaaatgattgttgggatgctgaaattttaacatcttttggatttattgaagttgttggacatgctgatagatcagcctatgatttacaacatcatatgaaatacacaggtgcaaatttatatgcttgtgaaaaatataatgaacctattgaagtcgaatatgtaaaaatgataccaaataaagctaaaataggacatacatttaagagtgaacagaataaaatatatgcatgtttaaatgaaaaaagtaatgaagaattactaattattgatgaagaattatctaaaaataataaatatatattaaatatttcaaataatgattctattaataatgaatgtaaatatgaattaacaagagatatgttatcatttcaaaaatataaaaaaaaagttcaggaagaaaattttattcctaatgttattgaaccttcttttggtatagggagattaatattttgtattctagagcattcgtttagaattcgacggtttactgatgataaagaagaaagacaatatttatcattaccatataaattagctcctatcaaatgttctatattatcaatatcaaataataaagcattctatccatatattaaacaaatacaaatgttattaaatcaatataatatatcatcaaaaatagataactctagtgtatctataggtaaaaaatatgcaagaaccgatgaaatcggtataccctttgctgtaacaatcgatttccaaacactaaaagataaaaccattacattaagagaaagagattctatgttacaaataagaataagtatgtctcacttggtagatattattaattctatgttacatgcaaaaaaaaattggaatgagtatatagctcaatatggattattcacacagcaggttttggattcctag

SEQ ID NO: 42 - protein, 889 aa, Plasmodium falciparum
MIIIVIFLLSMFFFENKTYCFISKINIKNLRHNKNNNNKYHLFASRELRKISSFVLDNRILFNKQKIRKRKFNFFNVYSNKMSDMDNIKEQKENDGCGSLEELIERYVCEISSLIERNECIKGIDDEDLKKEFMENEKLLQDKKMKLKDLYGKPSEELKLVENRTKLENLVKRKFFYTNSFEIYGGASGLFDYGPSGCLLKSELENLWRCHFIYYDEMLEISGSCVTPYQVLKTSGHVDRFTDLMIRDVVTNDCYRADKYLGDFLKAKIEELRKKNTKGDEHVDEKEKKQKRDDDINENKENNKNNENNKNDENNENNKNDENNKNNDNNNNNNNSCNYNCDMVGGLHNGNERLIQKIELILRKLDGMNEEEIKEIIKEYNIKSPLKNDLSEPFPFNLMFQTKIGPKDDNTEDKNKEKCKNVSNNKNLNSTNTNNNMNNVAFLRPETAQGIFVNFKKLLEYNGGKTPFAGAQLGLGFRNEISPRNGLLRVREFQMAEIEYFVNPKKKNHEKYYLFKYLMLPLYPRDNQLTDGVVIKNMTLEEAVEKNIIANEALAYFLARTYLFLLKCGINKDGIRFRQHLKTEMAHYANDCWDAEILTSFGFIEVVGHADRSAYDLQHHMKYTGANLYACEKYNEPIEVEYVKMIPNKAKIGHTFKSEQNKIYACLNEKSNEELLIIDEELSKNNKYILNISNNDSINNECKYELTRDMLSFQKYKKKVQEENFIPNVIEPSFGIGRLIFCILEHSFRIRRFTDDKEERQYLSLPYKLAPIKCSILSISNNKAFYPYIKQIQMLLNQYNISSKIDNSSVSIGKKYARTDEIGIPFAVTIDFQTLKDKTITLRERDSMLQIRISMSHLVDIINSMLHAKKNWNEYIAQYGLFTQQVLDS

SEQ ID NO: 43 - DNA, 5800 bp, Plasmodium falciparum
atggaaagtggtaataagaaaagaatagacacttatgaagaaaatgaatggatagaaaaagaagagggaaataatttgggggataataaaaatgcagattattttgtgagttctaatatagaagatgtattcatatctaatagaactacagaaaatgagaatgaagaaatgacaggtgaatttatgtcttcatcagacatttctaataaaggagatgaaaaaaatgcgtataagagagtaagacataaagagataaataaggaagatatgcatataggaaataatcataattatgtaatgaacgacaataatgatgataataatattcaaaataatgtttctaataatgtggaagagaatattcaaagtataagttttatagatcatgaaatgatcccagaaaaaatgaatatactaataaataacaacaatagtaatataattaatgacaatatatatattgatggtaataatcataataatatgtacattgatcatactccttcggataacatatataataataatgaaaaacatacaaaagaattatacgataagaagaaaccatgtggcatatataaaaatacaaattcaaattcaaatacaaattcaaattcaaatacaaattcaaattcaaatgatcattttaaagaagctaaagatgaaggaaataataatccagtagatgaattaatgaaagatattaaaatgtttaacaactctatgcaatctatatattcaactaataatttatcatttcaaaaaaatttatccaaaatgtattcagaattggcttctaataaaaatctagaatctcttcacaatttgtttaaagacacatcttttgggggtaatatggaaaaggcccaatttcttaaaaatattttattggctagctgcttacctcaaaatggaatgggtattaagaaaaatgaggttgcaattaataaagatatagaaaataacaaagaagtggaaaaaataaataataaaatacttattaatgatccaagaaatgtacaagtttcgcaatatattaaaaagaaaaaaagttcaaattataatttaaatgaatatacagaagaatctaatataacaaatttgagtgaatcacaaaatttgatttctaacatggaacccacaacagttttttctttgtcatctcataaaaataacttagatgtaaaggaaggagacgaaaatgtcggaaaaaaagaaacacccaaatttttagaagacgtagaaataaatacaaatgatttgaatataagagatgatataagtcccttaaatttaaatcaatataaagaaacatcaatgattaatatatggaataaatcaagttcaaaaaaaaatatatcttctaacgaatgggataaaatgaaaaagagtttttgtaacattgaaaataatttaatagattttaataaattaaataagacaagtaatgaaaatgttatagaaggaatacaaaatcaaattattgatgaagaaatgaaaaatatagaaactagtccatttattaattatttatctaatgacaatattatgactgtaggaaatacaaatatatcgaatgaacgttttcctgtattggattatgtagaacaaatgggttctaatgaaactatgttctatgataattttgacaaatatcaagttcttaaggaccatacttcaaattcttttcatttatataatagtaacgattcttcaaaggtttcatgtgcagaccaagatattaataagatggatgtggataatattaataataagatggatgtggataatattaagaataagatggatgtggataatattaataataagatggatgtggataatattaataacaagatggatgtgtataatattaataacaagatggatgttgataatattaataataagatggatgtgtataatattaataataagatggatgtgtataatattaataataagatggatgtggataatattaataacaagatagatgtggataatattaataacaacatttatgttgataatattaataacaacatttatgttgataatattaataacaatatttatgttgataatattaataatgaaatatatatggatgataataataataatgatgatgatacggataaacatagcaatatctataaacatatgcccacaaaatgtcatataaataatattagcccaacaaatgcaggtgatagaagcaaaatgagttctcctgctctacaatccatgagaacgaaaataggaaataccaatttattaacaaaggaagaagagggggggtcgaatttaaaaatatgtaagaatgaattaagtaagatggaacatacaaaagtaaatacaataaagatgaaatctcctaaaaatatcagtaaggtgtgtcaaaacaaaagtacaataaatgttcctaaggtagttaaggtaaaaagtaaaactaatgaaaatgtgaaaactccaaagatgacaaaaagaaatagtgacaacacaacgggtagaggtgatcagaagatgaatgttaatcaaataaataataatattaatgtgaataaccatgttacggtaaataataataataataataataataataataatggtagtgtaaataatcatattcaagttcatgagggtagtaataatcatggtgttagtagtttatcacctgttcatcagaatggaacattgactaataatatatgtgtaaagagtaataaaaatgaaaagaatgcatctggtgaaaaggatataacatataatatgaacgtggtgattagatgtagacctatgagtattagtgaaaagaatgatggagcaaaaaatgtaataaagattttagaaaacaaaatggtagtattattagatccatctgacaatagtgataatgtattaagacaaaatcggagtagagaaaagaaatatgtatttgattatgtatttgatgaaaatagttctcaagaagatgtttataataatagtgtaaaatgtttaatagatgcagtaataaaaggatacaactcaacagtatttgcttatggtgctacaggtgctgggaaaacacatacaattattggttataaaaatgaaccaggtattatgatgatgattctaaaagatttatttgaaagaataaaaatgttacaaatcatgaatgaatataaagtcaaatgttcatttattgaaatttataatgaaaatatatgtgatttattaaatccttcaaatgaatatttagatgtaagagaagatcctatcaaaggagtaaccgtttctaatatttttgaagtatgtacaacatctgtagaagaaataatggaacttattcatacagggaaccggaatcgaacccaagaacccacagatgcaaataaaacaagttcaagaagccatggggtattacaagtaattgtggaagaaactgaaaagggtcaaggggtatatcagcaaacaaaaagaggaaaattatgtgtaatcgatttagctggtagtgaacgagctagccaaaccaataataaaggaatgagaatgttagaaggtgcaaatattaatagatcattactagctttaggaaatgtaataaatgcattagttcttagaagtaaaggaaatagcaaatctaattttatacctttccgagatagtaagttaacaagattattaaaagattccttaggaggaaattgtaaaacggttatgatagcaaatataagtccatcccatttatcttatgaagatacacataatacattaaaatatgcaaacagggcaaaaaatataaagaatgtcgtaacagctaattcgatagttgttaaacatcatttaacaatgtatattgatgtaatagaaaaattaaaaaacgaaatcgagtttttaaaagagcaattaaatgaaaaagaaaaaatacatggttatatgagtactaattcgactaattatgattattatgatcaattgaaggattatgaaaaaaattattctaaggaggagttaatacatataatagctttgttaaaaaaggaaaaccagcgtttgaaaatgtgtgatacacatgagggtccaatgaataataatgaatctggtgctattataaataataataatgatgaacagcacaacaatgtaaatgataattttaatcacaacgaatatgataataataataataataataatagggaaaaattaaaccatgacatcttaacaaataagcataatgaagaactagccaaatataaagaagaagtaaacaatctcaaaatgatgaatgagaaattatttatggataataaaaattttcaactaaagttgcaagaatatgtaaatatttctaaaaatttaaaaacattaaatgaggaatataaaaaacaaatagaagcgttcaaaagtatggtacacaaccatgatatgaatcatattcaaataaaaaaaaagttggatgatttaaaaaaaaaatatgcccagctgaaggtatgtcataaatatatatatatataaaaaaaaaaaaaaaaaaaaaaaaaaaaaaaaaaaaaaaaaatatatatatatatatatatacatatatacatatacatatatacatatacatatatacatatatacatatacatatatatctttgtatatattcattttatttattttcaaggaaagtactgatgataaagataatgacgatgtcctagaaaaatggaaaaatgaattaacaaaagtaattaaacatatgtagagaaatatttgtacaatatttttattttatttttttaaaggcaataatattagaaattattatccataatggttatctattatatcacaaatttggtgatgtcattaaatagttgtagttaaattggtttatttgtttgtttatttgtttgtttatttgtttgtttgtttatttatttgtttgtttatttatttgtttatttatttgttcatttatttgttcatttatttgttcatttatttgttcatttatttgttcatctttttatttattattattttattttattttattttattttattttattttatttttgtgtgtgtgtgcgtgaagctattaaatgaacgtaagaaaataaaaatgataatattggatatagagagaaagttgatacagaataaagaaattggggcacacaaaatatcggaagaggacataaaattgttacaagaaaatgtaaccacacgaaatgtgtatatataatgtataatatatattgcataataataaatattttgtgatttttataattctcctttattttagaaaaccaagatggaccaccagctaaaactcaacattcttcagacaaacaatttaataaaagacttaccaataaaaataaaagacgaaaagatgaaaaattttctgtatcttttttatactaacaaggtattattgcaggagaaggaagagctacaggtatacccgaataaaattgtaacatgaataaatatatatatatatataaatgtttatatgtttatgtgtttatatgtttatgtgtttatatgtttatatgtttatatgtttatatgtttatgtgtttatatgtttatgtgtttatatgtttatatgtttatatatttatatatattcataatatacacattttagtgttcatgattgttcatcttcgcccttgtattttcttcttttttcacaggatttttttgaattatcatctaccattattaatcaaaaagaaaaacaaattgaagatttaaaaggaaagttaaaggatataaatgttccgatcacttcaaagaaataa

SEQ ID NO: 44 - protein, 1669 aa, Plasmodium falciparum
MESGNKKRIDTYEENEWIEKEEGNNLGDNKNADYFVSSNIEDVFISNRTTENENEEMTGEFMSSSDISNKGDEKNAYKRVRHKEINKEDMHIGNNHNYVMNDNNDDNNIQNNVSNNVEENIQSISFIDHEMIPEKMNILINNNNSNIINDNIYIDGNNHNNMYIDHTPSDNIYNNNEKHTKELYDKKKPCGIYKNTNSNSNTNSNSNTNSNSNDHFKEAKDEGNNNPVDELMKDIKMFNNSMQSIYSTNNLSFQKNLSKMYSELASNKNLESLHNLFKDTSFGGNMEKAQFLKNILLASCLPQNGMGIKKNEVAINKDIENNKEVEKINNKILINDPRNVQVSQYIKKKKSSNYNLNEYTEESNITNLSESQNLISNMEPTTVFSLSSHKNNLDVKEGDENVGKKETPKFLEDVEINTNDLNIRDDISPLNLNQYKETSMINIWNKSSSKKNISSNEWDKMKKSFCNIENNLIDFNKLNKTSNENVIEGIQNQIIDEEMKNIETSPFINYLSNDNIMTVGNTNISNERFPVLDYVEQMGSNETMFYDNFDKYQVLKDHTSNSFHLYNSNDSSKVSCADQDINKMDVDNINNKMDVDNIKNKMDVDNINNKMDVDNINNKMDVYNINNKMDVDNINNKMDVYNINNKMDVYNINNKMDVDNINNKIDVDNINNNIYVDNINNNIYVDNINNNIYVDNINNEIYMDDNNNNDDDTDKHSNIYKHMPTKCHINNISPTNAGDRSKMSSPALQSMRTKIGNTNLLTKEEEGGSNLKICKNELSKMEHTKVNTIKMKSPKNISKVCQNKSTINVPKVVKVKSKTNENVKTPKMTKRNSDNTTGRGDQKMNVNQINNNINVNNHVTVNNNNNNNNNNNGSVNNHIQVHEGSNNHGVSSLSPVHQNGTLTNNICVKSNKNEKNASGEKDITYNMNVVIRCRPMSISEKNDGAKNVIKILENKMVVLLDPSDNSDNVLRQNRSREKKYVFDYVFDENSSQEDVYNNSVKCLIDAVIKGYNSTVFAYGATGAGKTHTIIGYKNEPGIMMMILKDLFERIKMLQIMNEYKVKCSFIEIYNENICDLLNPSNEYLDVREDPIKGVTVSNIFEVCTTSVEEIMELIHTGNRNRTQEPTDANKTSSRSHGVLQVIVEETEKGQGVYQQTKRGKLCVIDLAGSERASQTNNKGMRMLEGANINRSLLALGNVINALVLRSKGNSKSNFIPFRDSKLTRLLKDSLGGNCKTVMIANISPSHLSYEDTHNTLKYANRAKNIKNVVTANSIVVKHHLTMYIDVIEKLKNEIEFLKEQLNEKEKIHGYMSTNSTNYDYYDQLKDYEKNYSKEELIHIIALLKKENQRLKMCDTHEGPMNNNESGAIINNNNDEQHNNVNDNFNHNEYDNNNNNNNREKLNHDILTNKHNEELAKYKEEVNNLKMMNEKLFMDNKNFQLKLQEYVNISKNLKTLNEEYKKQIEAFKSMVHNHDMNHIQIKKKLDDLKKKYAQLKESTDDKDNDDVLEKWKNELTKAIILEIIIHNGYLLYHKFGDLLNERKKIKMIILDIERKLIQNKEIGAHKISEEDIKLLQENVTTRNKTKMDHQLKLNILQTNNLIKDLPIKIKDEKMKNFLYLFYTNKVLLQEKEELQDFFELSSTIINQKEKQIEDLKGKLKDINVPITSKK

SEQ ID NO: 45 - DNA, 4194 bp, Plasmodium falciparum
atgaacaagataaaaataagaaaatttgaggatccacatgtttggatatatgaaaatgtattattaaataaaacattgaaattaaaagaaatcgaaaaaaagaaagataataaaaatgttccaaatgcattattgcatgaagaagcttgtaagaaattaaaaggcatattaaaagaatgtaaaaaatatgacaaagaattacaagaaattaagaataaaaaagaatcctttatattaaagaatactttacatccaaataaaaaaattaatttaaaatttttattgaatgataatcaatttaaagtaaaaaatgaggaagagaggaaaaattttaaattaatttttaacgaaaataaaaatatctatattaagaataatcaaaaagtatataataatataataaatataaaaaggaacagtcaaataacctctaccaataatatgaacaataataataataatgtaaacatcaataatgataatatacaacctacgaataatttattaaataatattaaaaaaatacagaaggaaaaaatttccaaattatattcagtttttaataatcacgtaaattattatgataattatttaaaagaaaaatatatgaaggaggaatatttatcaaatgtaaaatatgaatatgtatctccgcatcgtcataattacaatgatcatgatataaaacctgatgttatttataaggaggattccaatgtgtctaacacaacccacaataatcataacaataataataataataataataatagtaaaaataaaaataattttagtagtagtatttcttcttctgatcttttgtatcatacaaatcttggtaaaaataattcagtgtcgggtacaaatttaaagttaaatgtacacactaataatatacacattttagataataaacaatgttatgatacgcttcatcataataatgcttattcacatgatatatatggtaatcaggaaaatgtaaatactccaaaagataaatatataacaaagatcaataataaaaatgttgaggacatgaagaatgtgacaaataacattatattcaacaaattaaacataaacaatgaaaatacccaaaaaatttttttatacaataggaacgacaaagaacatgaatctataaagaatgataaaaacaattctaaggattatccttttgattataagaaagaaacatcctatttgacgacggaagaaaattgtaatcatatagatatttatgatgataacaaaatgtgtgatgataatatatatgtgaaaagaaatgtctaccataataagaataatagtgtgaaagacctttttgtaaaaagtttcaatattttaaatacaataaaccaaacctccttgtacgacaaacaaaatgatgatgtatcaaacgaggatgcaaacagaaatgttttgaatggtagtgttttatccatattaaatgaattaagggaaaataaggtaaaagaaaaaaataaaattggagaatataagaaggataatacattacacaaggatgatgaaaaggtttctgtgagtaggattcatacatatgagatgaaacaaaaagaagtgaccaatgttaataaaaatgaatccttctattcatatggtataaataataataataataattattattataattataataattgtaataatttgaaggagagcgtggttcctcataaaaaaaaagagaaccataaaaataagcacattaaacagtatgaatatttagatagtaataatataacaataaattctttaagtaaccatttagatgtagatgatgaaaaaataatcaatgtatgtaaatatatattagataatgattatatatataaatatacaaaaattgagaaagaagtagctgaattaatatgtgaagaattaaatgtctcagagaaattaaaatttagttgtatcaatttaaaaaaaaggaatcccatagttactatattaggtcatgtagatcatggtaagacaactttattggatcgattaagacattctaacatagcggacaatgagataggaggtattactcaaaagctgggagcatttgaagtagtatgtagagatgatgagatgaaagaaaataaaaatgtaaaggaatatattaatgataataaaaaggaagaacataatcattataataaaaaggaagaacataataattataataaaaaggaagaacataataattataataaaaaggacgaacataacaattataataaaaaggaagaacataatatttattgtgataattcttctaattatcataatagaaagattacctttttcgatacgccaggacattccgtattcagaactataaggaaacgatgtgtacaatgtagtgatttgatcgtattagtaatttccttagatgacggaattatgagtgaaaccattgaatgtattgaactagccaaaacgtacaatacaccacttattatagctgcaaataaaattgataaatttcataaaaatattgaagagctttcaaaaagtttattaaattataatatcgttactaatttagaaaatggggatgttcccatggttccaatatctgccaaaaaaaatataaatattgatattttaaaaaagcaaattttacatgttagtaataaattaaatttaatgtgtgattatggatctttatgttcagcttatatattagaaaaaaaagtggacccttctaaagggaaattattaactgttatatgtaaatctggaacattaaaagttaatacatattttataattggacatatatatggaaagatcaaaagaatatataatagtaataatgaaatagtatcacaagcatatccttcagaagttgtacaaatcataagttcaattcctttatcatatgataatataaattatggtgatattatgttagaaatgaatactttgaaatctgctcaaaaagtatctaaatataagttaaaattagttcaatataatttaataaatgatcattataatatgaacaatactttaggtgaaatatctagaaatatcgaaacaaataaaaataatgatattcataataatgataataatttagatgataacattatcgatgaattacataatgatatatctatatatgatggtaataaaaaaaaaaaaaattctaacaaattggatattaataaaaaatataacaataataataaaaaatataacaataataataataataataatatatataataataatatatataataataataatatatataatatatataataataataataataaatattacaataatcatagtaacgatttaaggaatccattaaataagttcaatagcaagaataataatttgagtggttctaattttaatttaaattctttcaagttaccgcaaatacctttaattttaaaaacatgcgatgaaggtagtttagaaggtataatggaaggaatagaacattttaacaaaaatgagactaaagaaaaatattgtaatatacataattttatagataggaattatataaataagaatatgttaaatgatgatataaataatatatctaaagaattattttcaaattggtgtcctttaaaaattataaataaaggattaggtacatttcatagtacagatttaaaatattgtgaacatataaatccatgctttcttatttcatttaatgttgatattgattttaaattattacaaccatatatagaaaatcataatattattttaagaaatcataatattatatatgaattatttaatgatatagaaaatatgtgtaacttttattttgattctttacatgtctatgaaccagtcgcaaaaatgattataaataaaactgggtattattctattaaaaaaaataaaacaaaaaaagttgttatatccgttgatataaaagaaggatcatttacatccaatgaatattttacacttaaaagaaataaacaaattattcataataaaatacatatactttctatgcaaaaaaataaacaaaatacaaacgagctaaacaaatcatgtaatattaacgccatcatatttaatattaattctgatgattttgaggtaggcgatgaaattgtggcttacaaaaaggttgtaaggtcccccctctttaacacaataaaatcatttgacctttcataa

SEQ ID NO: 46 - protein, 1397 aa, Plasmodium falciparum
MNKIKIRKFEDPHVWIYENVLLNKTLKLKEIEKKKDNKNVPNALLHEEACKKLKGILKECKKYDKELQEIKNKKESFILKNTLHPNKKINLKFLLNDNQFKVKNEEERKNFKLIFNENKNIYIKNNQKVYNNIINIKRNSQITSTNNMNNNNNNVNINNDNIQPTNNLLNNIKKIQKEKISKLYSVFNNHVNYYDNYLKEKYMKEEYLSNVKYEYVSPHRHNYNDHDIKPDVIYKEDSNVSNTTHNNHNNNNNNNNNSKNKNNFSSSISSSDLLYHTNLGKNNSVSGTNLKLNVHTNNIHILDNKQCYDTLHHNNAYSHDIYGNQENVNTPKDKYITKINNKNVEDMKNVTNNIIFNKLNINNENTQKIFLYNRNDKEHESIKNDKNNSKDYPFDYKKETSYLTTEENCNHIDIYDDNKMCDDNIYVKRNVYHNKNNSVKDLFVKSFNILNTINQTSLYDKQNDDVSNEDANRNVLNGSVLSILNELRENKVKEKNKIGEYKKDNTLHKDDEKVSVSRIHTYEMKQKEVTNVNKNESFYSYGINNNNNNYYYNYNNCNNLKESVVPHKKKENHKNKHIKQYEYLDSNNITINSLSNHLDVDDEKIINVCKYILDNDYIYKYTKIEKEVAELICEELNVSEKLKFSCINLKKRNPIVTILGHVDHGKTTLLDRLRHSNIADNEIGGITQKLGAFEVVCRDDEMKENKNVKEYINDNKKEEHNHYNKKEEHNNYNKKEEHNNYNKKDEHNNYNKKEEHNIYCDNSSNYHNRKITFFDTPGHSVFRTIRKRCVQCSDLIVLVISLDDGIMSETIECIELAKTYNTPLIIAANKIDKFHKNIEELSKSLLNYNIVTNLENGDVPMVPISAKKNINIDILKKQILHVSNKLNLMCDYGSLCSAYILEKKVDPSKGKLLTVICKSGTLKVNTYFIIGHIYGKIKRIYNSNNEIVSQAYPSEVVQIISSIPLSYDNINYGDIMLEMNTLKSAQKVSKYKLKLVQYNLINDHYNMNNTLGEISRNIETNKNNDIHNNDNNLDDNIIDELHNDISIYDGNKKKKNSNKLDINKKYNNNNKKYNNNNNNNNIYNNNIYNNNNIYNIYNNNNNKYYNNHSNDLRNPLNKFNSKNNNLSGSNFNLNSFKLPQIPLILKTCDEGSLEGIMEGIEHFNKNETKEKYCNIHNFIDRNYINKNMLNDDINNISKELFSNWCPLKIINKGLGTFHSTDLKYCEHINPCFLISFNVDIDFKLLQPYIENHNIILRNHNIIYELFNDIENMCNFYFDSLHVYEPVAKMIINKTGYYSIKKNKTKKVVISVDIKEGSFTSNEYFTLKRNKQIIHNKIHILSMQKNKQNTNELNKSCNINAIIFNINSDDFEVGDEIVAYKKVVRSPLFNTIKSFDLS

SEQ ID NO: 47 - DNA, 4989 bp, Plasmodium falciparum
atgagaagagggttaggaaatgagaagcgctttttgagacggtccttcaataggtcatactactacaagaagaatgaaaaagagaagattgaagaaatgaatagtaggaaaaataataattatgaaaaagaagaggaagaagatgatgaagaagatattgatggagttgatgaagatataaaagaaaaatgtagtaaagcagtgtgcgatatgaattcatctgatattgaagaaaggaatgaaaagaagaaaaaaaatgaaaaatttatagtaaaagaaaaaaaagaattaagtgtaaatgatgaatcttttctcataaagaatatggaacaaaataataatgataagggtcaagataaaaataatgttatatgtccattatgtgttgaggtgttagatgaaacagatcgaaattttttcccatgtgattgtggttatcaaatatgtttatggtgtctttattatataagagatcatatgaataatacatgtccagcttgtcgaagaagttatgaagaaaaaaattttatatataataaagagacccatgaaaaattaattaagaagcagaagagtaataagaataagagtgacaataataataataataataataataataataatataaataggggtgataataattatatgaataacattaacttaacaaatatgaatgaaatgaataatattaatgatatgaataatattaataataacaataatgatgataataataataataatgataataataataatgataataataatgataatgataataataatgataataataataataacaacaacaataataataataacaacaataataataataacaataataataattattattattatattagtaacaattataataataattatagtagtagtggtagtttattatataggagtgatacatacaaacatcccaatatatataatatacatgaatatgataatttgctagaaattattaaaagtataagagttgttcaaaggaatcttgtttttgttataggtataacagctacatatgccaagaaaactgttttaaaaaagaatgaacattttggtaagtatggaaaaatattaaatattattattaataaatctcaagcatataatcctcaatataatggtccatcctttagtgcatatattacctatagtaatgaaaaagaagccataaacgctatatactttatagatggaatgacgttagataataaaatattaaaagcttcttttggtacgacgaaatattgttcttcttttttaaaaaatgcttcttgtggtaatgaggaatgtttttacttacatgaactaggaaatgtaatagatagtttttcaaaagatgatatacatggacctaaacatatatatcatgatcttttatatttatattttaaaaaattaccagataaaaaaaatgacgggacttatgattctttatcaaatagtataaccatcaaaaattttaaattaaatgaagaagatgtatcttcgttagtaaaaatcgaaaaaactgaaacgaaaaaaaaattagaaaataatattgaagatacaaatgtgaatgatgatataaaaaaaaataataatataaattatacagaatttaaatattttaatgaatggaagaataaaaatttaaatttagaaaaaattaaacaagatcaaaataaaaatgcaccacctcaaaataataaacaatcaaaatggataatggaagataaaatattacaaataaaaaaaagtgcaacacatgacaatatacctatacaatcaaatgatcaagaaaattatgatatagatgatgatatacatgataatgatataaatgatatggatgatgttgatgataaaaaatcgaataataataataaaataaaagcaaagaaaaaaaaaaaatccaaaagtgaagatgtattacctttagatatgttaaaaaataattcatatatagcaactaataaaaataatatacctactaatgataagaaaggtaaaaattatttaaattctgtacaaaatacttctacttctttaatttttaatagttatagtgatgacaaagatcatatctcaaaaaataaaaataataacaccagcaaaaataataataataataataataataataatgtgatgaatgatacagattatcttaatgaattgtccgaaaattatccatcaattaatgaagctctattggataaagataaaaagaaaaaggcaaaaaaaaaagctgagaaaaataaagcggaaaaaaataaagcagaaaaaaataaagcggaaaaaaataaagctgaaaaaaataaagcagaaaaaaataaagcggaaaaaaataaagcagaaataaataaaacagatacaaataaagaaaatacaaataatgaagataaaaataatgaagataaaaataatgaagataaaaataatgaagataaaaataatgaagaagatagaaataaaattattacaaaaaatgaaagtgaagaacaaaaaaaagaaaacgattctacagataccaaaaagaataagaaaaagaatcaaaacaatcaactcatagaaaataaaaaaaaagaacaagataatataaacaaaaataacattactaataataaacaagaaagtaacaatattaatgaaaagagtacagatgattccaaaaaatttacttcccttatttcaaattattttagtgaattattagataagaaaaaaaagaaagacacatcaaaaaatgaaacccaagaaaaaaatgaggaaattaataaagaaaatgtcatagataaaaagaaaaataaaaatacccaacctcaacatgttatcatcttcaacaacaacaatgataattataacaataataataataataataataatagtaatattattatcggttttcgtgaaggacaggttgaacttgcacggagaaaagaatttatttttacagatgacgggaaaattaaaaaaatagtggaagaaaaagataagctagaaggaaaatcaaaagaagacaagaaaggagatcaacaatcagatgtacatcaaattatagacaagaaacaaggaggaatagaaaaccaaagtttagaagaatcaaaaagaaaagcaaaaaacattcaacaaaaggataatacaaaaaatgcagaacttcttaaatgtgatgagaaaaaaacagaagggaatctaagtaatacattaacacattatgttacaaatcaacaagataattttgatcaagacatagaaaataacatacataatcaaaacgaggaaaacaacctaaataaaaatacatcaaaaggtaaaaaaaaaatagaaaataataataaagtggtagatacgaaaatattaaatatcgaagatattattaaaatgaaaagtattaataataatgataatataaaattaccagaagaaataaaagaatatatcaagaaaatgaaaagtggaggtataaaagaaaatgtggaatatgatatatatcataaatttataaataattatttcaatgtaaaagaatatgtagatggtattattgtggtagaagagaaagaagtgaaagcgatgaaagggaatgataataatgtgaaagatcaaaaaaaaggaaaacatgaagaagataataagaagaaagtattaattagcaaaacagaagaaggtgatacatcaaaaagaaaacaaaaaaatatgtcggataaaaaaaataaaaaagaaaaaagaaaaaagaaaaaagacaaaaaaaatgataatgataatgaggaagaaaatgataatgaagaagatcaagaggaggatgaaaagcaggatattataaataaagatggtattttacaaaaagagaacaaaaaaataaaaaacaaaaataaaacaaaaaaaaaaaatgatcaagaagaaaaagaagaagaagatgaagatgatgaagatgaagaagatgacgatgaagaagaagaagaagaaatacaaaaggataatgtaacattaataaagaagaaaaaaaagaaaaaagaaaaaaaaaatatttcaaataaaaaaaatgtaatgtatcataaagaaatggaaggatatataatggatacaataatgggtataatattaaatgaattaaaaggtaaaaataatgtcaaacaaattaatattaataaaaataattatgatgatgaaaaaaatgtattactcaaggatgtcgaaatttttataaaaaatttatgtgttgctaaatgtaaatctatagaaaataataagaacaaagaaaatatactttatataatagaggaaggaaatgatgaaaataatacatcaaaaaaaaaagaagctaaaaaaaaagcaaaaagaaatgattatataatatattcaaatgatgaacatacatttttaaaatcacacaaaggtataatgcaatatatattaaaaaatggaaacaccagcagtaataaaaataataagattaaaaatgtggatgataaaaataataatgtggatgataagaataataatgtggatgataaaaataataatgtggatgataaaaataaaaatgtgggcgataaaaacaaaaatggggatgataagaataaaaatgtgggtgatagcaataaggctaaaataaaaataagtgaatatctaaatgataaaaatacttttgatttttttaaagatctgataatatccaataatcaagatacgatccatacacctgatcatattatattcgataaaatatttaacgagcaaattaattttgtacaacaattatgtgaaacagattttaaaataaattcaagaaatgttatatcgacaaataaaaaaacagatagacatctatatcaatctaatcaaaatgtacataataaattaaaaaaaaatacacaaggaggaggtaatatatcaaatatatgggttaatttcgataatactgttcaaaataaagaattgaatgagaagctaaatttaagtgcataa

SEQ ID NO: 48 - protein, 1662 aa, Plasmodium falciparum
MRRGLGNEKRFLRRSFNRSYYYKKNEKEKIEEMNSRKNNNYEKEEEEDDEEDIDGVDEDIKEKCSKAVCDMNSSDIEERNEKKKKNEKFIVKEKKELSVNDESFLIKNMEQNNNDKGQDKNNVICPLCVEVLDETDRNFFPCDCGYQICLWCLYYIRDHMNNTCPACRRSYEEKNFIYNKETHEKLIKKQKSNKNKSDNNNNNNNNNNNINRGDNNYMNNINLTNMNEMNNINDMNNINNNNNDDNNNNNDNNNNDNNNDNDNNNDNNNNNNNNNNNNNNNNNNNNNNYYYYISNNYNNNYSSSGSLLYRSDTYKHPNIYNIHEYDNLLEIIKSIRVVQRNLVFVIGITATYAKKTVLKKNEHFGKYGKILNIIINKSQAYNPQYNGPSFSAYITYSNEKEAINAIYFIDGMTLDNKILKASFGTTKYCSSFLKNASCGNEECFYLHELGNVIDSFSKDDIHGPKHIYHDLLYLYFKKLPDKKNDGTYDSLSNSITIKNFKLNEEDVSSLVKIEKTETKKKLENNIEDTNVNDDIKKNNNINYTEFKYFNEWKNKNLNLEKIKQDQNKNAPPQNNKQSKWIMEDKILQIKKSATHDNIPIQSNDQENYDIDDDIHDNDINDMDDVDDKKSNNNNKIKAKKKKKSKSEDVLPLDMLKNNSYIATNKNNIPTNDKKGKNYLNSVQNTSTSLIFNSYSDDKDHISKNKNNNTSKNNNNNNNNNNVMNDTDYLNELSENYPSINEALLDKDKKKKAKKKAEKNKAEKNKAEKNKAEKNKAEKNKAEKNKAEKNKAEINKTDTNKENTNNEDKNNEDKNNEDKNNEDKNNEEDRNKIITKNESEEQKKENDSTDTKKNKKKNQNNQLIENKKKEQDNINKNNITNNKQESNNINEKSTDDSKKFTSLISNYFSELLDKKKKKDTSKNETQEKNEEINKENVIDKKKNKNTQPQHVIIFNNNNDNYNNNNNNNNNSNIIIGFREGQVELARRKEFIFTDDGKIKKIVEEKDKLEGKSKEDKKGDQQSDVHQIIDKKQGGIENQSLEESKRKAKNIQQKDNTKNAELLKCDEKKTEGNLSNTLTHYVTNQQDNFDQDIENNIHNQNEENNLNKNTSKGKKKIENNNKVVDTKILNIEDIIKMKSINNNDNIKLPEEIKEYIKKMKSGGIKENVEYDIYHKFINNYFNVKEYVDGIIVVEEKEVKAMKGNDNNVKDQKKGKHEEDNKKKVLISKTEEGDTSKRKQKNMSDKKNKKEKRKKKKDKKNDNDNEEENDNEEDQEEDEKQDIINKDGILQKENKKIKNKNKTKKKNDQEEKEEEDEDDEDEEDDDEEEEEEIQKDNVTLIKKKKKKKEKKNISNKKNVMYHKEMEGYIMDTIMGIILNELKGKNNVKQININKNNYDDEKNVLLKDVEIFIKNLCVAKCKSIENNKNKENILYIIEEGNDENNTSKKKEAKKKAKRNDYIIYSNDEHTFLKSHKGIMQYILKNGNTSSNKNNKIKNVDDKNNNVDDKNNNVDDKNNNVDDKNKNVGDKNKNGDDKNKNVGDSNKAKIKISEYLNDKNTFDFFKDLIISNNQDTIHTPDHIIFDKIFNEQINFVQQLCETDFKINSRNVISTNKKTDRHLYQSNQNVHNKLKKNTQGGGNISNIWVNFDNTVQNKELNEKLNLSA

SEQ ID NO: 49 - DNA, 9219 bp, Plasmodium falciparum
atgtgtaattttataaaaaaaggtattaggtttaatggagataaatatattttcctttttgatatatttataaagaaatatttattaaatgtattcgtagcaaatatattatgggaagaagagaataatatatgttttttaaatagattaaaaaataaaagaaagaaaagtattttatttcttaaagaagaatatttacgatatttaatgatattaaataaggaagagaagaataaaaagaaacgattaaaaaaaatatatgaatgtataaaagttttttctattaaagaatttcgatggcttatcaataagttggaaataatatatttttattttttttgtcatttattacttttatgtatttttcaaaatatttttctacttacatacatgagtaaagaatattttttgaaaaacatacacgactatatgataaatattttatccaatgatattaaatttaatacatgcattgaatttacacataatgataagtatgaacaaaaatgtataaccatggcttattatgattttcttttaaacaagaaaggaaagttaaagaaaaggaacaaatattatgatataaaaaatatagaacctttaacaggaaaagataagaatttgtattcctattataatttttcacctttttttcctatgtcttcatcagatataataaatgttaatacaaatgataaaatatcaaatattttatggaatgataaatatattgatacattaaaccacgttaatatgaaaaaaaaggatattcccttaaatattcatagtaataatatacttatgaataattatgcatacagaaaatatgttaggagttatatgattaaaaagagaataaatgatctgattttatataatttgaagaatatatttgaaaaaataaataatattgagaaactaacaaatataaataattttatgaattttaaaaaggaatatgaaaaggtttctaaagaagtatgcaataataataataataattatgatccaagtgactatatgttaatattacctaatagttcgaaggaccatgctttatataataatataaataatgatgaatatatgtataaaaagttttgtaattttatttctcaagcaagggaaattaagaaacaaagagaaaaagaaaaatgtcatagagacgaaaaatgtgatagaggagaaaattatgatagaggagaaaaatacgatagagacgaaaaatacgataaagaagaaaagggccttaaagaagataattatagagatgttaacgaatggaacagtaataaatccgaacgttgtaataaaatttatccgagtgattataaattttttttaagtgaggataaaaaatatgatactccttactattcaaatgaacgggttgattttcataatagtgatatatatatgaatgatatggatgaggaattatattatagctcatatcataacaatcatcataataatgatataacatataatagtaatgtttataaaagaatgttaaacgaagttatccatccttctgttgagagtaacgatgtgaagaagggacctttaaataatgataatataaaaaacaaagaatctaatgtgtatgaaattaatgatataatataccaattaaatggtgagaaaaaaatgaacacaaatatgtgtgaaaaaagaggaaataaaatttttgattcaaataattttcataatattaatgaaaggaaaaagaaaatattagatgaaaatgacatgataacaattgataataatatagataagaaagagaatattttatttccttatttccatatggaaatattaaaagataatgaaatgaatataactaaatattataaagataaacagtattatggtcaatataaatatgatgaaaatatatatatatatgatttaattgtattagatacctctggatatatatacaaagtttcgacagatggtagttaccattggaaacgaaaaattgtagaccatatacaagactattcaaatattgaagaaaaagacgatgaacggaaggtattgaaaaagcgaaataaattgaacgaaaaagacatgtatgaaagtaataataagtatgaaagtaatatgtatgatatgaatacgtatgaaagtaataagtacgatatcaatacgtatgataaaaatatttcggatagtactaaagctcatcaaaatatttacgtattaaaaaaaaatgtttatgatatgaattatgattcaaaaagagcgttaaaaatatctccttatcataattattttaatacatcgattataaattctattaatagagataaattaaaacattccaaaccattatataagaacaatataaaaacgaatgatgataataaaaaattaagggaaaataaaacgaaaaacaaaagattagtttcaaattatttaggtaatttattttatataaatgaaaataatgaagttataccattaaatataaatattaaagatgttgtaaataattccccatttaaatcccctctgtttcctaacatggtatttattggttcacgagaatctactattattaatttagattatgacacaggacatgtactaagaaaatatgatgaagcatctaatgaattgttagacaaacccccaaaaaaaaaatcaagaaaaaataaaagtataaaaaatgtgaaagatataaatgataatatgaagttatataaagaaggtagtcaaaatgtagaggagttatcctttaccgaggaggagaataaaaagaaaagtattttagagggtgagaaaatagaagtggcgtccttaaataatgaagagaatatgaataaaggttttgtgtgtgaaaaggatgataaaataaataattatgataatgatgaagatgatctattctatgaacaatatgaagacaacaatgataatgataataataaaaatgataataataaaaatgataataataaaaatgataataataaaaatgataataataataataataataataataataataatagctattattattataatattaatggtaatgctagtgatgatatattagtacattcaaaaaatgaattattaaataatacgtatataaataaaacaaatataaaagatgaaaactcaaataataatgaatcatttctcaataaaattgatgggatgaataattttaaattgctaccaaaaagaaatatgaaaagaaatagaaaaaagaatctccttaagagacttatggtaagtacaaataaactgagcatgttattgaatagatatcatttaattaatcgtagtttagaaagaatgagaaaagatattaaaagagggaaaaataaaagaatattaaaaaaacgtcaattacaaataagtttaataaaatgggtaatcaaagcagtagatgagaatacattaaaaaagaaatggataacaacttgggttgatgttggatctatatttatgacagatgttcataggaaagatacatcatttataaattccttaattgaaattgttggaaataaattaatattaagaccaatagaaaaggacaaaatgaaaagtactacatatcaaattttaaagattatgaataatgacactgatgaaatacaaatgtatcgaaatgaagatatgaaatatgaagttattaataatgtggatgatataaataatgtggataatataaataatgcgaataatatgaacaatgtgaataatataaacaatatgaacaatatgaacaatatgaacaatatgaacaatatgaacaatatgaacaatataaacaatatgaacaatataaacaatatgaacaatataaacaatataaacaatataaacaatatgaataacattctaaatgataggttaaaaaatcgaattaataataaagataattccaacataaaatcgaaaatatttattttttcagaatccatatcatccgtttttgcagtaaaatataaaaatttatcaaatatatttacgttagatattatagcaaaaccaaatataaaattatattctgattatgataatttgaataattttacatataatcctgtacatgtaaaaaaagagagaacactttttttgccgttttctaaggatatatctgatttagatggagataagttttcatgtagttttgaagataatataatatatggtaaaagattaatacatcgcttaaatagtatatcagtaaatatttcttctatagaaaaagatatgaaatatttattatcaaatattatatatgtatatgacaagaataagaggattccaataagttatatatatgatatgaagaatttaatatatgaatatcaaaaggttaagcaagagtttttatatcatttaccttgggatgaaggagaccagaaatatttaagtcgaacggatgatgtattaaataatagtataatagataatataggtaaaaagggtccaatttttatttgtgaatatataaacaaatttatggatttatactttgaagagaatgatatttgttatgattattgttctatgttaaatatatgggataaaatttttaataatactgttagtgatggagattctttattattgtcaaatttgtatcgtgttgtacataatgcctttaagaataataataaatataataataacaatatttattttgataataatattaacattaatattaatagtagtagtagtagtagtagtagaagtcgtagaaatatttataactttgataattattataataataggagagattataatagtttttgggaagataggcataatatattaatgaatagagaaaactttttaattaatacaagcacagataaagttttttcagggggaaaaaataatgaactgaaagaatttacatccattagatataaaagaagaagatggtactggagagtattttatactattatgtttataatttttttcccagtattatttatatatagaagaattattaaaaggagaaaaggtagtagtaagggtaataaaataggtacaagtagtaataataagttgattaaaaaaaatcgaacttttaaagattatgaagatgatgaaaataatataatgagtgaagatgaagaagacgatttggatatgaattatgatttaatatttgatgatgatagattaaaagttaaaaaaataaaaagaatgagaaaaaattataataataataataataataataataataaaaacaataataatatcagtaataataacagtaatagtaatagtaagagtaatcgatttttatccaaattaagtaatatagatttagctaatattgatttaaatttaattaaaaaaagtcatgggaaaaaaatggataattttgaacaacccactcttgtggacattttagctagacatgcaagagatagtacacataatgatggtgtatcttattatcctttcaacgaaaacgaaacttataatatgttatcattaaattatgcttggggtggtaatcataagcatatgaatgttgaaaggacctcagaatataatatgggtaatatatctcatcaactaaattataacaatataagaaatttaggtgataataaaatatcagcatatgaattagatatatatgagaaagaattatttcatttatatagaagaagggcagcatctcaggatgtacttaataaaaaatcttttgttatgaaaaaacggatacgtagtagttataaagttggtagtagcaataaatatcataagaaaaattatacagataatgaaaaggataagaaaaaatatcgtagttataaagaaaaacatataaatgaaaaaatgttcgataaaaaagaatttctgaactttttaaccaattttaataagaagtttatgaagaagaattctttggtggatcatttaataaaaatgaatgataaagcagaagataattatgatggttataatagtagtggaagtagatataataatataaatgatgatggtgttgaattgtgtggtactaaaaggtatacgaataataaaaataatagtgattatgataattataataataataataatatgaaaaataaaagatattccaataagaaacataataatgataatattattattaataataataataacaaatatacagatgaaaggaaatatcgaaataaaagtataaaagaagatgtggattatacaaatgattattataatatacaattaaataataataaaataaataacaatcaaacaaaaaataaaatcgatactattagaaatattagtcatgagaaattaggtaataataaaagttcgagtgctaggaatttgtctttaatacaaacatctcatattccatacgatgctccattagctgattttttagaaaacggaagattcttaagaacttttgaaaatatttctcttataggacagggaggatttggttcagtttataaagtatcacatcgattagaacctggatctccaacatatgctgtgaaatttatttatttaaaagtaagttcattagataatgtaagttcaaggagatattttcgagaaatcgcagctaatagagatatatatagtaaacatgttgttcgatattatacatggtggtgtgaagaacctcaatttttacctatgcatctgatgccaaaagaaatccaaaacttagtaaaaaagaataaagatacctttaaaaaaagacttaccaaaaataaaaagtatagtaataattgtataagtgatagtagtaataataacaatagtagttgttatagtgctagtagttataattcgagtattaatagtaattatagaaatatgaaattatggataaaaaagaaagaacaaagtcctgatatgaaaagatataaagaggttcttagaaagaataatgctcctaatttagttttttatagtgataacgatggtttaacatctaagaataaggaaaatcctgagaaaaatcacaatccatttttgagtgataaaaatttttctgattctatatataaaaagaaaaaaagtcatgattataattcatctagccacaaactgaaaaaaagaaaaaacaagaaaaaaaaaagtaaaaaaaaaagaaaaagtaaaagtaaaataaaaacaaatgctcaaggaatatatgaggaaagtgaaaacgatgaaggaagagatcactttcaatataaaaaaggaaaggaacagttttctaaatttataggaaaacataattctatgggttttacacaaagtttccaagaatatgatccttttgataatggttatttgagtgaagaagatagagatcttatagttttcgccgataatgaagaatcaaatggaaatgaccaacaaatgatacgtcatgataatatgaacaatgaaaatgttattataaagcatagaaatgaagatgataaaaatggattggatggtgacaaaaatggattggatggtgacaaaaatggattggatggtgacaaaaatggattggatggtgacaaaaatggattggatggtgacaaaaacgaattggatggtgacaaaaatggattggatggtgacaaaaatggattggatggtgacaaaaatggattggatggtgacaaaaacgaattggatgataatacaaaaaaattggatgataatacaaaaaaattggatgatttattaatgaaacaaaaaattaatagtttaacaagaaacgatattgttaatattgagaatgagaacccagctcctcatgctactaataatattaaaaataaaaaggttgatttaaatggagaattaacttattatgattacgttggaaaaaatgaagtcataccaaattctcgaaccgaaacgaatgttgaaagtattaatacgaatggtatgtttaataataaattttctgttatgaaagacgaaggaggggaatataagaaaaaagaaaacatgacctggggagacacgaaaagggatggtttatatgaaaatggaaaacacgaaaaagatggtttaggtgttaataaatgtataacaaataaatatattgaaaatgatgatgacgatgatgatgatgatgataataataataataataataatatagatgaaaggaaaaaagacctaaagaaaaaacaaaaaaatgctattactaaaggtaatgaagatttgttagcaacaaatggtacaaataataaagagaaaagaaagaaggatgatgatataaataaaaatatggaaaaaataaaatcatataaaaagaaaacaccagttcctgaattttctatagtgttattattgcagatggaattgtgtaaaggatataccttacgtaaatggctagatagatctacgagaagtgacaaacctttacattttacttatagtgataaaaaaatgaatcatccattagaatttgacttatttaaacaattaattaaaggtcttaaagatattcatgctacttgttttattcatagagatttaaaacctgaaaatatttttgtagatcctgatacgtatacattaaagattggagatttaggattagtacgatttattgaagagaagaaaagagaaaaggattttaacaatattgattgttataaagataatatatatacagatattaatcagaatgcaataactagccaaatatctataaaaggacaaattataggaacccctggttatacagcaccagaaggtggagctttatgtgatgaaaaagcagatatatatagtgcagctttaattttattagaattgttatgtccacgttttacaacaattatggaacgatataaaagattaaatgatttcagaaattattatacagtacctgattatgtaaaaattcatttaaacccatggtatattttaatgttacaaatgtcaaaacccaatccagcagatagaccatcggctgctgatgtgtatagtaaaattaaagtattgctagatcctcatttgactgattttgcatttagctttaacgatattcataatgagcatatgaacaaaccacctcagggaactaataactttgaaagaataacggacaataaggacaaattcgtaatacaaagtgttgtggatatgaagaataaagtagaaaatgaagaaatacctattgaaaaaggattaaatagtaatgtagagaatataaaaaatgagaataatggtgcagacaaatag

SEQ ID NO: 50 - protein, 3072 aa, Plasmodium falciparum
MCNFIKKGIRFNGDKYIFLFDIFIKKYLLNVFVANILWEEENNICFLNRLKNKRKKSILFLKEEYLRYLMILNKEEKNKKKRLKKIYECIKVFSIKEFRWLINKLEIIYFYFFCHLLLLCIFQNIFLLTYMSKEYFLKNIHDYMINILSNDIKFNTCIEFTHNDKYEQKCITMAYYDFLLNKKGKLKKRNKYYDIKNIEPLTGKDKNLYSYYNFSPFFPMSSSDIINVNTNDKISNILWNDKYIDTLNHVNMKKKDIPLNIHSNNILMNNYAYRKYVRSYMIKKRINDLILYNLKNIFEKINNIEKLTNINNFMNFKKEYEKVSKEVCNNNNNNYDPSDYMLILPNSSKDHALYNNINNDEYMYKKFCNFISQAREIKKQREKEKCHRDEKCDRGENYDRGEKYDRDEKYDKEEKGLKEDNYRDVNEWNSNKSERCNKIYPSDYKFFLSEDKKYDTPYYSNERVDFHNSDIYMNDMDEELYYSSYHNNHHNNDITYNSNVYKRMLNEVIHPSVESNDVKKGPLNNDNIKNKESNVYEINDIIYQLNGEKKMNTNMCEKRGNKIFDSNNFHNINERKKKILDENDMITIDNNIDKKENILFPYFHMEILKDNEMNITKYYKDKQYYGQYKYDENIYIYDLIVLDTSGYIYKVSTDGSYHWKRKIVDHIQDYSNIEEKDDERKVLKKRNKLNEKDMYESNNKYESNMYDMNTYESNKYDINTYDKNISDSTKAHQNIYVLKKNVYDMNYDSKRALKISPYHNYFNTSIINSINRDKLKHSKPLYKNNIKTNDDNKKLRENKTKNKRLVSNYLGNLFYINENNEVIPLNINIKDVVNNSPFKSPLFPNMVFIGSRESTIINLDYDTGHVLRKYDEASNELLDKPPKKKSRKNKSIKNVKDINDNMKLYKEGSQNVEELSFTEEENKKKSILEGEKIEVASLNNEENMNKGFVCEKDDKINNYDNDEDDLFYEQYEDNNDNDNNKNDNNKNDNNKNDNNKNDNNNNNNNNNNNSYYYYNINGNASDDILVHSKNELLNNTYINKTNIKDENSNNNESFLNKIDGMNNFKLLPKRNMKRNRKKNLLKRLMVSTNKLSMLLNRYHLINRSLERMRKDIKRGKNKRILKKRQLQISLIKWVIKAVDENTLKKKWITTWVDVGSIFMTDVHRKDTSFINSLIEIVGNKLILRPIEKDKMKSTTYQILKIMNNDTDEIQMYRNEDMKYEVINNVDDINNVDNINNANNMNNVNNINNMNNMNNMNNMNNMNNMNNINNMNNINNMNNINNINNINNMNNILNDRLKNRINNKDNSNIKSKIFIFSESISSVFAVKYKNLSNIFTLDIIAKPNIKLYSDYDNLNNFTYNPVHVKKERTLFLPFSKDISDLDGDKFSCSFEDNIIYGKRLIHRLNSISVNISSIEKDMKYLLSNIIYVYDKNKRIPISYIYDMKNLIYEYQKVKQEFLYHLPWDEGDQKYLSRTDDVLNNSIIDNIGKKGPIFICEYINKFMDLYFEENDICYDYCSMLNIWDKIFNNTVSDGDSLLLSNLYRVVHNAFKNNNKYNNNNIYFDNNINININSSSSSSSRSRRNIYNFDNYYNNRRDYNSFWEDRHNILMNRENFLINTSTDKVFSGGKNNELKEFTSIRYKRRRWYWRVFYTIMFIIFFPVLFIYRRIIKRRKGSSKGNKIGTSSNNKLIKKNRTFKDYEDDENNIMSEDEEDDLDMNYDLIFDDDRLKVKKIKRMRKNYNNNNNNNNNKNNNNISNNNSNSNSKSNRFLSKLSNIDLANIDLNLIKKSHGKKMDNFEQPTLVDILARHARDSTHNDGVSYYPFNENETYNMLSLNYAWGGNHKHMNVERTSEYNMGNISHQLNYNNIRNLGDNKISAYELDIYEKELFHLYRRRAASQDVLNKKSFVMKKRIRSSYKVGSSNKYHKKNYTDNEKDKKKYRSYKEKHINEKMFDKKEFLNFLTNFNKKFMKKNSLVDHLIKMNDKAEDNYDGYNSSGSRYNNINDDGVELCGTKRYTNNKNNSDYDNYNNNNNMKNKRYSNKKHNNDNIIINNNNNKYTDERKYRNKSIKEDVDYTNDYYNIQLNNNKINNNQTKNKIDTIRNISHEKLGNNKSSSARNLSLIQTSHIPYDAPLADFLENGRFLRTFENISLIGQGGFGSVYKVSHRLEPGSPTYAVKFIYLKVSSLDNVSSRRYFREIAANRDIYSKHVVRYYTWWCEEPQFLPMHLMPKEIQNLVKKNKDTFKKRLTKNKKYSNNCISDSSNNNNSSCYSASSYNSSINSNYRNMKLWIKKKEQSPDMKRYKEVLRKNNAPNLVFYSDNDGLTSKNKENPEKNHNPFLSDKNFSDSIYKKKKSHDYNSSSHKLKKRKNKKKKSKKKRKSKSKIKTNAQGIYEESENDEGRDHFQYKKGKEQFSKFIGKHNSMGFTQSFQEYDPFDNGYLSEEDRDLIVFADNEESNGNDQQMIRHDNMNNENVIIKHRNEDDKNGLDGDKNGLDGDKNGLDGDKNGLDGDKNGLDGDKNELDGDKNGLDGDKNGLDGDKNGLDGDKNELDDNTKKLDDNTKKLDDLLMKQKINSLTRNDIVNIENENPAPHATNNIKNKKVDLNGELTYYDYVGKNEVIPNSRTETNVESINTNGMFNNKFSVMKDEGGEYKKKENMTWGDTKRDGLYENGKHEKDGLGVNKCITNKYIENDDDDDDDDDNNNNNNNIDERKKDLKKKQKNAITKGNEDLLATNGTNNKEKRKKDDDINKNMEKIKSYKKKTPVPEFSIVLLLQMELCKGYTLRKWLDRSTRSDKPLHFTYSDKKMNHPLEFDLFKQLIKGLKDIHATCFIHRDLKPENIFVDPDTYTLKIGDLGLVRFIEEKKREKDFNNIDCYKDNIYTDINQNAITSQISIKGQIIGTPGYTAPEGGALCDEKADIYSAALILLELLCPRFTTIMERYKRLNDFRNYYTVPDYVKIHLNPWYILMLQMSKPNPADRPSAADVYSKIKVLLDPHLTDFAFSFNDIHNEHMNKPPQGTNNFERITDNKDKFVIQSVVDMKNKVENEEIPIEKGLNSNVENIKNENNGADK

SEQ ID NO: 51 - DNA, 10932 bp, Plasmodium falciparum
atgaagaaaatttatttaagcatttgtcttatgataattgttatcttcaaaatttttaagaaaaagcaacatataatggataaacatttttatgacagaaacttttataaaaagcataaccatggttttacatgtaacctttttttaattttatatattccttataagagaagtttatgttatgataccttattcaatcaaatgataaaagaaagtacgtttccttccaaaataaatgtgacttataatttaaggtaccatctgtaaaaaaaaaaaaaaaaaaaaaaaaaaaaaaaaatattaataatacaaaaagaataaatctatatgtttgaatatatatatatatatatatatgttttattttcttattccttcagatattatatattggacattattaatcccaatattataaaagttaatatatttataaattatttaatcttattatacaaaattaataagaacgaaatttatgcaagatgccctttcttttcatccaataataatataacaaaaattataaataatacaatcagtagagtaaagatatataataatttccccttttcagtaacaggtacaactttgtttattcagacaaataatattaatatatcgacaatataccataaattagaaaatattattatgaacttacatatattttacagttataaaaaatttatattttataaaatatcaaagaatgtattcataagaaaaagtataataataaaatatccaaacaaacgatatcttagtgaacgcaaatatatagaacaaaaccaaaaaaaaagcctcaaaaaattaaaacatgatgaaattaaaaaagtaggagaaaggaaaaaagagaaaaaaaaagtaaggtattcttcatataataaatcatatctaaatgatgaaaaaaacacatttgataatttacattcagcaaaatatatttccaaaaatagaattattaaatataaaataaataaaattaaaaagatagaagaaaacgtatttaaaaaaataaatactaaaaagcatcatattaataaaaatattaagttagaatcatctggtaaaaaggagtcgaaaattaatattaataatataataatacacaaaaataaggatagacatttgatgaataatacaaattttgtggaaaatcctgtgacaaatgattatataatatataaacaagaatttattagaagtgtgaacacattaacatctttaaaactttatggtatgaatttaaattatttagaatatcaaatattaactatatatgattcaactgatgaatgtagcggaacaaaattggcagaaataaatattcttgaaaaatatgattcttatatgattactgattcttttaaaataaagaaagttggtcttttccttatttgtattactttaacttctgtagaatatgtaggtgtattaaaagttcaaaataatttaattgatgactttgatagtataataaataataataatatatcaacatttaattgttcaacagatgcaaaatcgatattaatttattctaaagaacgaattataaatttaaatactattaataatgaagaaattaaacctgaagaatttattaacctttccaaatattctgaatatttacaaggtgatatttctcttcttgcttgttgtgttaatagcaatggatatgttgtggtattagataaagatgttatatttgttttatataataaaatattaaaagaaattattattcactttttaaaaaatcctatagctatatatttatataatcatacaatatttataactgatgcggaacggaaaaatattttccgttttgtgtctaaatatattttaaaaaaaacatcgaaaaaattgacacctatatggaattattatacatatatgaaactccaagaagagaacggggtagatttaggtaagaatatggaaggaacgagtgaattaatatcaaatatattaaaaactaataaattattagaaaaagcggatactataaaacgtatggatgaatttaataatggagaaagttatcttataaaaaatactaaattattaaatagtctaagaaattttccaaaaataaataaatatcctataagtctattaaatgaaaattttacattaaattatccttcaggtattgtagtggttaatgatacaatatattttgttgatacaggattacatgtattatttgcatattctttacaaaaaggaattataacagaaatgtttggttatgtaaatcatgaagtgaaaagtgagaacggattaaataaaccatattcattatcattattttctacaaataatggtaatacgaatttattatttttaagtgaattaacaagttcacgtattttaatatttgaaataaataattctattaaattatatttaatttataataataacatcaattttgatattatcacatctattgtaactacttcttattttttaatcatatgtggtttaaaacaaaatatggatatttataaaagttatataacatttattaaaatagaagaattatcagatatagatatacaatataatgaatatgatacaacattatattatggaaaaaaattttctctagatcctttaataaaaagtccaaatattaatgaattcaaaatggaacaaatagataaatttacaaataaaataattaacacaggattaacaattcataaagatacaggaattattagtgggagaataaatatatctgctgaatttcatattaatatatttgtaaaagattattttaaaaaaaaaaaattaacctttgtaaactttgtttcactttgtccaaaaggatttaatattgaaaataataaatgtataccatgtcctatcggattatattattcaaatagtaaaagtataaaccaatgtataccttgtgaaaattatagaaaacattccacaacgttatataattctgctaaatcaaaaacagaatgtttatgtaaacccggttattttctaaaagacaaacggtgtgttaaatgtgttgctgggttttataaagatcaaataggaaatttcaaatgtcagggaacatgtgaaaatacaaaaatgagtatagaagtaggtgcaaaaaattatgaagaattaaaatgtacatgtaaagatggttattttacagaaaaaaagaaaaaagaatgtataccttgtccttttggaaattattgtatatataatcctaaggtaaaatataaagcagatattatacgttgtaaaaataataaattaactttacacagaggttccaaatcacctaatgattgtttatgttctcaaggttattatcatgattataaaatggatgaatgtgaattatgtaattatgatcaatataaatcacatattagtaatgatccatgtgtaccatttatatctaaatcgttagttaatcaagaatatctaatcaatgaaccttattttcaatatacaaatatatatattaaacaaacaagtaatattatttttgctcctaaaaaaggttctaaaatgttccacgaagctactttatgtgaaacaggatattcatatagcatgaataaatctatatgttctatatgtagatataataattattgtttaggtttagatcattcaagtattatatgtcctaaaaattctataactatcaaattaaaaagtgttagtgctctagattgtttgtgtataaaaggatatggaagaatcataattaatactaaccaatcatttacaatatcctgtataccatgtccatacaatacatttcaacctcatcattcatatggaaaatgtattccttgtccccctcatacatttactaaaattacaggagccacatcaataactgaatgtatacccaaaatgggatattataatatatcattcgaatacatatatgaatattcaaaacaacaaatgttgaacagtattccacattttattcaatactatcattactttttaaagaatcaatatgaacattttgccaaaggaaagaataatcaaaagaaaatgaataataataataataataataaaaaatatacatgtacaactcataaacgaattgccataaataacaaaagcaacaaacataaaaaatttccacgttacattaatgtagaggaaaaaaaatatatatataaagataaatataacataccccaaattactaataatatacatggtttgaaaagtccatacaataatatattccacacaaattatctaaaaaatatttttatatttatggatttattcaaaatgaataaatatatatataatcaaaagagtaaacaacatagagaaaccataatttatggtcataataatttatcatttgttcatataaagaatgaaaaggatttttcatatgatgaaaaaaaaagcaagtataatatcaaaatggaaaataataacaataataataataataataataatattaatatttatagtaataataatttaaattttgtgagacaaatgaatgagaaaaataaagaatatacaaaactactatcaacaaaaaaacgtaatatatctcaatcaacatcttttctaaataacaaaattatttacgatgattataggaacttaatattcaatacatcggacacatataatcataatgtatctaaaagtattaatataatatcacatgatattaatgatatattaaaaattataaaagcaagagaagaaaattattttattaataagaataaggacataaaatatacatgctatgaaaatgaagaaaatgaaacatctaaaaaaagaaatcattttatgtatgtatataccatacctgaaattgatgtaatgagctgtttaaattcttgtatatctaacatatattgtacaggtatcgaaatgaatacaacagacgataaagggaaaacaaatttatttcttatgttatacagaagttatggtaaaacgtttatttatttctataaatgcagtttatatttttatgaagatttaacatcgtattataaaaaagaaaattttaaagtaataaaaaatgtggaacaatataacaatacacacaataaaataattagttgtgttattcaaaaaaaccctatacttcatttatggaaaatttattcctttcagaaatgtccacataattattattgcgaacaagaatctttaaaaaaaaaaaaatgtccaccaaattcaataaaaacaatatatgatggaaccataaatgattgcttatgtctacctggttattacttaaaaggaaatatacaaacgtgtatcccatgtgaaaaaggaagttacaaaaatacaatatctaacgattcatgtataaaatgccctattaattttactacattatttgagacatccaaatctgtttatgactgtgtttgtagaaaaggatattatttttcatggaatacaaatattgatacaaatgatatagaaaaaaaaaatatatataataataatattaattctatatacaggaataaaaatgaaattaaattgataaaagaattagaagaagaatatgcatttaacgtagaaaagaaaagaaaaaataaacataaatttatattacataaaaaattgaataatagatatagagaaaatattcataaaaaacagatatccctaaaacgaaaaattaaatttcttaacgaacaaaaagaaataaataatcatttgaattttttacatgtgaatgaaattttaaacatttctttttttaatgataatcaaaattatatatacaagaataaaaataaacaagaaaatgatacaaatatagaaatcaatccggtatctaagcaaacatctttacattcaaataatatttctaataaatatatgagaaataattttttacaaataaatgaaaaattgtacattaataattccaataataattacaatgaatatatacacaaggctcaatgtaccaaatgccctagaaaaatgttttgtccaggttattggttagaaaactatgaaaatgagatacaccatcctcctatatattgcccgaaaggctctctaatacttggtacaacgatagaatcaacagatattcataaatgtatatgtaggaagggttatagtataaatttatccataaaaccaaatagaaacaaaaatgtaaatgtaaatgataatgataatggtaataataataataatagtaataataataataataatagtaatggtaatagtgccactctcaataataataataacatgtgtgttatgtgcaaagagggatattataaagatgttatagataattctgtatgtgcaggattatgcatagaattttctacatcttttaaagggtccattagtaaaaaacaatgtttttgtactgttgggaaatatatgattcaagatgaaaaagatgaaaataaatgcattaactgttcgaaaggatcaatatgtataggtggttttaaatttaaatcattaagggaattaataaaaaatcaatattatataaatttaaacatctatgatcattctatacctttaccaaaaaaaggatatttcgctaccttccaaattaatcatgaagattttaaatggaaaccattgaattcattacatatagaaattaataattatgaaaaagggaatataataattactgacaaaattattcttaatgtgtttcataaaaaattgcatcttataaatataggcgaaaaaaataaatatgatcaagctgatcaaggaatatatataaagaagaacctaaataacaattcttttatccataataataataatataaaatatattgtagaagaaagtaaacatttaagagatcgaacaatggcaaatattcctaatgaacctatattagtaaatgaaaaattagaaccaataatatataaaaataattttttaatgatagatagaatacctgattttcatttatgtccaattagtaatagatgtatgggtacttcatctaatttatgttttaaaggttcagaaggatatttatgtaataattgttcaaatagttatgatgttattcattttcgatcacaatgtattaaatgtagaaagaaaaaaacagaaatgataaatttattaatacataaatttttgttttatataattatattttttataatgtatttaaattattattgttatataaaaaagaattatttatttattagtatattaaaaatatggtatctctttattatatgttttataccatatagttttattatggaacctatagaaaatcatctcaaaaattaccaatcatatttccaattatatataatattaccaatgagatttatagcacattattttaaattgaattgtttctttaataattcatataacgaaataaacaataatataacagataataaggtacatatatatatatacatatggtatatacaaagatttcttaaaatagctgaaccaatatttgattgtattctttttacgttgatttttttcataatatatgttttatatatttcgtggaataatgaaaaaatacaaatagctcaaagtgttataaaaaaacaaattgaaaatatacaaaataattcgtatggaaaacatatatatgacttttattattattattatcagaataatgtaattaatataataaaaaatacaaataataattgtaatgttaaaaattggagtcaatcttattatgttcatgattatttatcaaaaacaaaaaaaaaaaaacaaaaaaaaaaactatccaaatggagtctcacacaaacaaaaaagaagttaatccaaagatggaaacataaaataagcagatcatttaaacataaaaaggaaaattctgaaaattatgattatttcgaaaataaagagaataaagagaataatagtttatgtagtgaatcaaccaaacatgacaatactataaataataattatactacttcttctgttgaagacaagtttatatatacgaaaaaaaagacaacatataataataatacaaaccaatcatgtgatgatgaaaatatatataatgttaaagaaaaattattaaaaaaagatataacaaataattttggatatgaacatattgaaaaagagaaatattggacaagtatttgtttatcaaatatatataatattagagcattaggtttatttcgttatatacatccttataatataaatatatgggataaaatgaaacgtatattatctgatttgtcatgtgtatatattataatattatatatttatttccctttcataataataaatttattagaacttgtatggtgtcaacctattcaatataaagaaaatccttctttattaattttatatcatatgccatcacaagtatgtgatcttcaaaataaattatttttatcaggagttttatattcttgtttttttttaattatatatatcatattattttctatctatatttatgatacatcaaaaagcatcaaagccattggatcctattcaaataatttaaaaagttactttttatttaatggacataattatcaaaatagatgttgggaaattataaatattatcaaagtatcatttattattattccttttatatgtcaattatatactaaaagaaatgtgaattcaaaatattttatatgttgttgtatagtacttgtattgattacagaagttgcatgtattttattttattctccttatgataaaagatcagataatttattacaaaaattaagtctcacatcttctttttttattttaatttcctatttgaccgtacaagtaggtttcttttttgatgttacaatcttaaatattattcctatttttttatttttctattttcatgtatatgttataaaacaaattatcttggattttgcaatttataagaacatcttaaaaaggaaagacaatcatatatcttttgataaaaaaaaaaaatctaatgatatgttgaatgactataattttttatttttttttgataaaatagagatagataacaaagattcaaacacacccaaaggaatcgatacaaccgtgcaatgtgatgaaaaggaaattaaaaataaggatgatataaataattttaatcataataaaataaatgatgtaaataacaaaagaaaaaaaaaaaaaaaaaaaaaaaaaaaaaaaaaaaaggacgaaacaacaaaaagtccttataatgaagaatataatttgttaaattttgttttaagttcaaataatattccttcttattcaatatattttgatgataaggaagaagaaatatacctatttcagaataataacacaagaggatatgaatataaaaagaaaattattaacaatatgaaatataataatgatataaaaatagagcaaacaaaaagaatcagtttagatttactacattcagatatactttattataacataaggaagggaactattaatagtgatatatcaaatatgaatacctataataatataaaaatgagaaagcaagaaaataattattaccatcaaaatgattgtaataatataaatagtgatgattataataatgtttgtgtacaaaaaagaatatcaaataaattagaacattttattagaattgaaagagaatatgataaagaaaaacattatataaaaaataatgaaaaaaataattcagaagatgatatgtttttcttaaatattacacattttataaattgttttattgatgcaataaatattctatatataaatcaatcatatgataaaataacagttgagtggttaagttttataacaagattttccatatgttttatacactggatgaaaaaccatgatgaaaatttaattaactttgtaccattaaatgataaacaatttgaattaaaaaaaagaaatcttcttttctattctttatttacatcttatacagaaatatataatctttatcattctatcaacaatagtaattctcttgcaggatgtaaaaaacggtttattaattcaaaaaatgtaagtaaaccatataaacacataaaaaaaatcaaaaataaacaaggtgatctttatggtataaataatttaaacgatacaaaagatataggtgacaaatatcagagaaattataagagaaataactactacaatggtaatatcaaaaatgaacatttaaataattatgatttaaataattatgatttaaataattatgatttagatgattatcatatatataataatgatatatataataatgatatatataataaccatatagataatatccatttagataataaccatttagataatcataaaaaggacaaaccttttattattacatcagcaagttctccctctcttccatgcttcaacatttcagacgatcaattttttagatgtgagaatgatataattaagctattattcgatgaaactttatttaataatttaacaattacactaatggaattttattttgcaatttatataatacaatttattgagagtaaaaagctatcaatattaattaatttattctgtgaaaaaaaaaaattcttaagtaaagagaggcaatttttaaaaatactcatgtcaagaaaacatatcatacaaaaaattatagataaaaataatttatccacacatatgaatgaatatatcgaatataattattatttagaatataataaaaaattgaaaaagcaaagagaaaaattactaaatctaattataaataaaaaaggacaaattcgaacacttaaaagcataaaaaatttgcaacttatggaagaaaatatggtacaagggaaaaataatataaatacacattttgttaaaacattaaagaagttattagaacatcaaccatcacaccaatcagaaaataacataaaataa

SEQ ID NO: 52 - protein, 3525 aa, Plasmodium falciparum
MKKIYLSICLMIIVIFKIFKKKQHIMDKHFYDRNFYKKHNHGFTCNLFLILYIPYKRSLCYDTLFNQMIKESTFPSKINVTYNLRYHLCPFFSSNNNITKIINNTISRVKIYNNFPFSVTGTTLKSIIIKYPNKRYLSERKYIEQNQKKSLKKLKHDEIKKVGERKKEKKKVRYSSYNKSYLNDEKNTFDNLHSAKYISKNRIIKYKINKIKKIEENVFKKINTKKHHINKNIKLESSGKKESKININNIIIHKNKDRHLMNNTNFVENPVTNDYIIYKQEFIRSVNTLTSLKLYGMNLNYLEYQILTIYDSTDECSGTKLAEINILEKYDSYMITDSFKIKKVGLFLICITLTSVEYVGVLKVQNNLIDDFDSIINNNNISTFNCSTDAKSILIYSKERIINLNTINNEEIKPEEFINLSKYSEYLQGDISLLACCVNSNGYVVVLDKDVIFVLYNKILKEIIIHFLKNPIAIYLYNHTIFITDAERKNIFRFVSKYILKKTSKKLTPIWNYYTYMKLQEENGVDLGKNMEGTSELISNILKTNKLLEKADTIKRMDEFNNGESYLIKNTKLLNSLRNFPKINKYPISLLNENFTLNYPSGIVVVNDTIYFVDTGLHVLFAYSLQKGIITEMFGYVNHEVKSENGLNKPYSLSLFSTNNGNTNLLFLSELTSSRILIFEINNSIKLYLIYNNNINFDIITSIVTTSYFLIICGLKQNMDIYKSYITFIKIEELSDIDIQYNEYDTTLYYGKKFSLDPLIKSPNINEFKMEQIDKFTNKIINTGLTIHKDTGIISGRINISAEFHINIFVKDYFKKKKLTFVNFVSLCPKGFNIENNKCIPCPIGLYYSNSKSINQCIPCENYRKHSTTLYNSAKSKTECLCKPGYFLKDKRCVKCVAGFYKDQIGNFKCQGTCENTKMSIEVGAKNYEELKCTCKDGYFTEKKKKECIPCPFGNYCIYNPKVKYKADIIRCKNNKLTLHRGSKSPNDCLCSQGYYHDYKMDECELCNYDQYKSHISNDPCVPFISKSLVNQEYLINEPYFQYTNIYIKQTSNIIFAPKKGSKMFHEATLCETGYSYSMNKSICSICRYNNYCLGLDHSSIICPKNSITIKLKSVSALDCLCIKGYGRIIINTNQSFTISCIPCPYNTFQPHHSYGKCIPCPPHTFTKITGATSITECIPKMGYYNISFEYIYEYSKQQMLNSIPHFIQYYHYFLKNQYEHFAKGKNNQKKMNNNNNNNKKYTCTTHKRIAINNKSNKHKKFPRYINVEEKKYIYKDKYNIPQITNNIHGLKSPYNNIFHTNYLKNIFIFMDLFKMNKYIYNQKSKQHRETIIYGHNNLSFVHIKNEKDFSYDEKKSKYNIKMENNNNNNNNNNNINIYSNNNLNFVRQMNEKNKEYTKLLSTKKRNISQSTSFLNNKIIYDDYRNLIFNTSDTYNHNVSKSINIISHDINDILKIIKAREENYFINKNKDIKYTCYENEENETSKKRNHFMYVYTIPEIDVMSCLNSCISNIYCTGIEMNTTDDKGKTNLFLMLYRSYGKTFIYFYKCSLYFYEDLTSYYKKENFKVIKNVEQYNNTHNKIISCVIQKNPILHLWKIYSFQKCPHNYYCEQESLKKKKCPPNSIKTIYDGTINDCLCLPGYYLKGNIQTCIPCEKGSYKNTISNDSCIKCPINFTTLFETSKSVYDCVCRKGYYFSWNTNIDTNDIEKKNIYNNNINSIYRNKNEIKLIKELEEEYAFNVEKKRKNKHKFILHKKLNNRYRENIHKKQISLKRKIKFLNEQKEINNHLNFLHVNEILNISFFNDNQNYIYKNKNKQENDTNIEINPVSKQTSLHSNNISNKYMRNNFLQINEKLYINNSNNNYNEYIHKAQCTKCPRKMFCPGYWLENYENEIHHPPIYCPKGSLILGTTIESTDIHKCICRKGYSINLSIKPNRNKNVNVNDNDNGNNNNNSNNNNNNSNGNSATLNNNNNMCVMCKEGYYKDVIDNSVCAGLCIEFSTSFKGSISKKQCFCTVGKYMIQDEKDENKCINCSKGSICIGGFKFKSLRELIKNQYYINLNIYDHSIPLPKKGYFATFQINHEDFKWKPLNSLHIEINNYEKGNIIITDKIILNVFHKKLHLINIGEKNKYDQADQGIYIKKNLNNNSFIHNNNNIKYIVEESKHLRDRTMANIPNEPILVNEKLEPIIYKNNFLMIDRIPDFHLCPISNRCMGTSSNLCFKGSEGYLCNNCSNSYDVIHFRSQCIKCRKKKTEMINLLIHKFLFYIIIFFIMYLNYYCYIKKNYLFISILKIWYLFIICFIPYSFIMEPIENHLKNYQSYFQLYIILPMRFIAHYFKLNCFFNNSYNEINNNITDNKVHIYIYIWYIQRFLKIAEPIFDCILFTLIFFIIYVLYISWNNEKIQIAQSVIKKQIENIQNNSYGKHIYDFYYYYYQNNVINIIKNTNNNCNVKNWSQSYYVHDYLSKTKKKKQKKKLSKWSLTQTKKKLIQRWKHKISRSFKHKKENSENYDYFENKENKENNSLCSESTKHDNTINNNYTTSSVEDKFIYTKKKTTYNNNTNQSCDDENIYNVKEKLLKKDITNNFGYEHIEKEKYWTSICLSNIYNIRALGLFRYIHPYNINIWDKMKRILSDLSCVYIIILYIYFPFIIINLLELVWCQPIQYKENPSLLILYHMPSQVCDLQNKLFLSGVLYSCFFLIIYIILFSIYIYDTSKSIKAIGSYSNNLKSYFLFNGHNYQNRCWEIINIIKVSFIIIPFICQLYTKRNVNSKYFICCCIVLVLITEVACILFYSPYDKRSDNLLQKLSLTSSFFILISYLTVQVGFFFDVTILNIIPIFLFFYFHVYVIKQIILDFAIYKNILKRKDNHISFDKKKKSNDMLNDYNFLFFFDKIEIDNKDSNTPKGIDTTVQCDEKEIKNKDDINNFNHNKINDVNNKRKKKKKKKKKKKKDETTKSPYNEEYNLLNFVLSSNNIPSYSIYFDDKEEEIYLFQNNNTRGYEYKKKIINNMKYNNDIKIEQTKRISLDLLHSDILYYNIRKGTINSDISNMNTYNNIKMRKQENNYYHQNDCNNINSDDYNNVCVQKRISNKLEHFIRIEREYDKEKHYIKNNEKNNSEDDMFFLNITHFINCFIDAINILYINQSYDKITVEWLSFITRFSICFIHWMKNHDENLINFVPLNDKQFELKKRNLLFYSLFTSYTEIYNLYHSINNSNSLAGCKKRFINSKNVSKPYKHIKKIKNKQGDLYGINNLNDTKDIGDKYQRNYKRNNYYNGNIKNEHLNNYDLNNYDLNNYDLDDYHIYNNDIYNNDIYNNHIDNIHLDNNHLDNHKKDKPFIITSASSPSLPCFNISDDQFFRCENDIIKLLFDETLFNNLTITLMEFYFAIYIIQFIESKKLSILINLFCEKKKFLSKERQFLKILMSRKHIIQKIIDKNNLSTHMNEYIEYNYYLEYNKKLKKQREKLLNLIINKKGQIRTLKSIKNLQLMEENMVQGKNNINTHFVKTLKKLLEHQPSHQSENNIK

SEQ ID NO: 53 - DNA, 5170 bp, Plasmodium falciparum
atggccaaaaaaatagatgaattattttcgaagaaggaaagatatttaaaagaaataatagaaagtaattgtatatatgtaaaagatttaaatcactgggttggtactaattatatagctcgactgaaattaaaaaaagagctattaaaagtaacccccaaattgttaataaacaaaacgcgttcgagtaagggaaaataaaagaatttatcgtttatatgtatacaatgatatgtaaataaattgttatataatatatatatatatatatatatatatatatatatatatatatatatatatatttatttatttatttatatttatatattgtttatgtatttattccattgtgtggacttatatatttcataccttcaacatttttaataatatatattttttccttgtaggagcaagccgatgtagggtgtgcggtttttctatcgaaaaagacaatttacgaattgggtatcctacaaaagatccgcgaggtgattatggttatataagttgttgggtacacattgaatgtagtaaaaaaatattgtattcatgtttgtatattgaagagaatgagaatgttttaaaaggatatttacatgagtataagaatcataattgttctggagaacattataataaatatgaaatatatatttataataatttacaatgggatttattttttgggggtatcgaaaatataaacgaagaagaactatctaaattaaaagagatggcaaaaccatatgaaataaaaaatgatttgaaatgtaggaatagttttgaaatgttaataaatgaagaaaatgaaaaaataaattccttagattatttaaatgtagaaaagaaaataacaaattataatttgattatacctaaagaattaaaatatgatttattacaatatcaaaaagaaggcatttattggatgataaatcaagaaatgtctaatgtgaaaggtggaatattagctgatgagatgggtatggggaaaaccatacaagccattacattgatattgtgtcagaagttgaacaagttaaaggaaataaaaaaagacgaacgaagtgatgatcatgataaggttggttataagaatgatgatgaggaggatgagaagaagaagaaaaagaaaaagagtcatatgttacatggtgatatttataaagaagatattctatcctttgaagaaagagatacaaaacatgaaaaatcgattaaagagatagatataaaaaaatcatataaaaatagtagcagcatattatattgtaaaaattccacatcggatgatttgaaagtaaaggaagaatcagattgtagtgttatattaatagaaagtgatgatacacagaatgaaaaaatgaatcataaaaatgatgttatggcagaaaataagatagatactgaaaatgtgttaaatgtgaaaaaaataaagaatataaaaaaggaatgtgttaataataaaaaaataaaaaataataataataataataataaatcaaattttaaaaagaatgattttattaacaagttaaaagggcaaacattgataattgcacccgttgctgctgttatgcaatggaaatctgaaatagaaaaatttgttgatgagaatattttaaatgtttatgtttatcacggtaattccaaaataataagtgatgaagaattaattaaatatgatattgttataacatcctatgcagttgtcgaagttaattttagaaagattgttaacaaacataaacaaccatgtgaatattgtggaaggttatatctaccaaataatttagatatacataagaaatatttttgtggtcctacagctgttagaacagaaaaattgaaaaagagaaaaaaaaaaaataaggacacagcacttgttgctatgaaaaagtttgatgaaacatttgttccgacacccagaaatgtgctattagaaattatggctaatagtaagaaagaattagaagatgaaaaaaaaaaaaatattgaaatatctaataaaagtctaaatcataataatactaagaaaaataaaggaaaaaaaaataatcaaataaaacaaagaaatgcacaaaaagatagtaatatagatgttattgtattatcatcggatagttgtaaagaaaagagctcttcttcagaaaattcggtatattctccactgtcgagaaaaacatcgagtagaattattgacttaagtaatttaggatttgataaagaaactatggaacaagttattgaaagtttaagtgaagggggaaaaaaaaagaaaaacgtaaaaaatgtaaaaaatgtaaatagtgtaaaaaatgtaaaaagtgtaaaaaatcatcgagatgttaaatggaatgtagttattaaaaatatgttagagaattttttgtataatgtagatatgaatgacaaatgtaaacatgtgttgattaaaatatatgtaacaaacacaacaatacaaaacactgagctggaaaaattaaatatgggggaactcaaggttgttctaataacaatgggaaagcatatatttggtaccaaagttgagttaataaatagaatattagtatcagcaaaatatatacggaaagaattatatgacgagaatactgagacagaggaaaaagacacatcaggtgttcataatgaggatggtgatacatctatgggtgttactaatcaaaagggaaaggataaattttgtaaagaaaggaaaattaaaaaagaggatgaaaaaagtagcattgagaagaaaagaaaaacggtggatgttataagtgtgggtggggacgtaaaaagggatatgtcattaaataagaggaggaatacgacaaatcgagggacgacgatgaagattaaaggggaaacgagagaatatgcatcaaataaaggaaagaataataatgatgatgataataataattcttattatagcgatgcaaagagttatacaagtgagagtagcgatgaatcctatcaaggtgatatatgctcgaaaaaaaaagaacccaaaaaaaatacaaagagtattagaagaagccaaaggaagagttattgtaagagctctttagaaagtgaaaaaaaggaggaatccgataattcatataatactaatgattataatgattgtgacgattgtgacgattgtgatgattataataattgtgatgataataattattgtgatgattgtgatgattcgtcaaattcgtttgattcgtatgattccattattgttcgaaagtcgaagatgagtaaggaaaagaaaaaaagagagaatatgaaaatttttgatgaaagtgcgttacatcagatatattggaatcgtattattttagatgaagcacatcgaattaagaataggaatacatctactacccaatctatattgaatttaaaatgttgtggttatagatggtgtttaacgggaacaccgttacagaatcggatttctgaattgtatagtttaataagatttattgaattttatccatatgcttattatttttgttcaaaaaaggattgtaaatgtttattattaaattatgagatgcgagataacaaatattgttatttttgtaatcattctaggataaatcattttaattattttaataaaagaattttaaaacctatacaatcttttggatatagaggggaaggattaagtggtatgtcttatttaaagaatgaagtgttagataaaatattattacgtagaactaaaggtgaaaggaagagtgatattaatttaaaacctttgattataaaaataagaaaggataaattatcaaaagaagaaaaagatttttatgaatctttatataaacaaacatcaacacaatttaatacatatgtgaattcaaatactgttttacataattatgcacatatttttgatttgttaagtagattgagacaagcagctgaccatccttatttaattatatttggtaactcctttttaagtgatccttctggtaaatttataaagaaaaatacaacaataattccagctatttcaaatgattatgtatgtggtatatgtttagaaaatgttcagaaaagaaataatataagcacaaaatgtaatcataatttccacaaatcatgtttaaaacaatatatagaaagttttgagatggaaaatgctgatcagcaagaagaggaaaaggaggattctaattttaaaaatagtaatatgataaagtacaacacctatgatattggtcaacgtgaaggtatgaataatgtaaaatctacaaatagttgtaagtacgatattgtaataaatgatgatatccataacaatataaataaattagaaacacatgagaatgataatttgattactagtaaggatctattgaaaaataagaaaagcttagaaaagaaatctaaatctatatctgttgtgaagtttaaaaataaagatggatatattaatttgttaagtaatgatgaaaatgtaaaagattatcctttaggatgtcctgtgtgttatatcccgttaacagttgattttaatcttctcgtagataaagaagaaaatgaagaagatgaaattattatatgtaaagaagaaactacgtatataaataaaagttttataaatagaatcaatactcaagaatatagatcaagtactaaaattgaagcagtttatgaagaagtacaaaatgtaataaataatacagatgataaatgtttaattttttcacaatattgttccatgttagatttaatagaatatcatttaaaaaaacataatattgtttgttctaaattattaggatatatgtctatgatttcaagaaataatattttatacaattttaatcaagataaacaattaagagtattattaataagtttaaaagcaggaggtgaaggtttaaatcttcaagtagcaaatcgaatatttattgtagacccttggtggaatccagcagctgaactacaagctattcagagagctcatcgaattggtcaaaccaaaacggtatatgctatacgttttattatagaaaatactgtagaagaaaaaattattcagctgcaaaataaaaagcagttggtttttgacagtactattggagattctggaaacgccatgcaaaaattatcaaaggaggatttggcattcttattccactcataa

SEQ ID NO: 54 - protein, 1647 aa, Plasmodium falciparum
MAKKIDELFSKKERYLKEIIESNCIYVKDLNHWVGTNYIARLKLKKELLKVTPKLLINKTRSRASRCRVCGFSIEKDNLRIGYPTKDPRGDYGYISCWVHIECSKKILYSCLYIEENENVLKGYLHEYKNHNCSGEHYNKYEIYIYNNLQWDLFFGGIENINEEELSKLKEMAKPYEIKNDLKCRNSFEMLINEENEKINSLDYLNVEKKITNYNLIIPKELKYDLLQYQKEGIYWMINQEMSNVKGGILADEMGMGKTIQAITLILCQKLNKLKEIKKDERSDDHDKVGYKNDDEEDEKKKKKKKSHMLHGDIYKEDILSFEERDTKHEKSIKEIDIKKSYKNSSSILYCKNSTSDDLKVKEESDCSVILIESDDTQNEKMNHKNDVMAENKIDTENVLNVKKIKNIKKECVNNKKIKNNNNNNNKSNFKKNDFINKLKGQTLIIAPVAAVMQWKSEIEKFVDENILNVYVYHGNSKIISDEELIKYDIVITSYAVVEVNFRKIVNKHKQPCEYCGRLYLPNNLDIHKKYFCGPTAVRTEKLKKRKKKNKDTALVAMKKFDETFVPTPRNVLLEIMANSKKELEDEKKKNIEISNKSLNHNNTKKNKGKKNNQIKQRNAQKDSNIDVIVLSSDSCKEKSSSSENSVYSPLSRKTSSRIIDLSNLGFDKETMEQVIESLSEGGKKKKNVKNVKNVNSVKNVKSVKNHRDVKWNVVIKNMLENFLYNVDMNDKCKHVLIKIYVTNTTIQNTELEKLNMGELKVVLITMGKHIFGTKVELINRILVSAKYIRKELYDENTETEEKDTSGVHNEDGDTSMGVTNQKGKDKFCKERKIKKEDEKSSIEKKRKTVDVISVGGDVKRDMSLNKRRNTTNRGTTMKIKGETREYASNKGKNNNDDDNNNSYYSDAKSYTSESSDESYQGDICSKKKEPKKNTKSIRRSQRKSYCKSSLESEKKEESDNSYNTNDYNDCDDCDDCDDYNNCDDNNYCDDCDDSSNSFDSYDSIIVRKSKMSKEKKKRENMKIFDESALHQIYWNRIILDEAHRIKNRNTSTTQSILNLKCCGYRWCLTGTPLQNRISELYSLIRFIEFYPYAYYFCSKKDCKCLLLNYEMRDNKYCYFCNHSRINHFNYFNKRILKPIQSFGYRGEGLSGMSYLKNEVLDKILLRRTKGERKSDINLKPLIIKIRKDKLSKEEKDFYESLYKQTSTQFNTYVNSNTVLHNYAHIFDLLSRLRQAADHPYLIIFGNSFLSDPSGKFIKKNTTIIPAISNDYVCGICLENVQKRNNISTKCNHNFHKSCLKQYIESFEMENADQQEEEKEDSNFKNSNMIKYNTYDIGQREGMNNVKSTNSCKYDIVINDDIHNNINKLETHENDNLITSKDLLKNKKSLEKKSKSISVVKFKNKDGYINLLSNDENVKDYPLGCPVCYIPLTVDFNLLVDKEENEEDEIIICKEETTYINKSFINRINTQEYRSSTKIEAVYEEVQNVINNTDDKCLIFSQYCSMLDLIEYHLKKHNIVCSKLLGYMSMISRNNILYNFNQDKQLRVLLISLKAGGEGLNLQVANRIFIVDPWWNPAAELQAIQRAHRIGQTKTVYAIRFIIENTVEEKIIQLQNKKQLVFDSTIGDSGNAMQKLSKEDLAFLFHS

SEQ ID NO: 55 - DNA, 8822 bp, Plasmodium falciparum
atgagaaaagggttaatatataggacaattctttgttatattttacttatcttaatcggtattattataaaaaaaaaaaaaaacaataatatatatatatatatatatatatatatatatatatatatatttatgtgtgaatattccaatatatttattttcattttaattttaatttttatattttattttgttttattttttgtagaaaagagtcatcagaataatatatataaagtaaatggaaataatgaaaactttcagttttcacatttgaatttttattcaaagaacaatgaaggtttaaattttggaaggagtaaagtttcgaagggtagtaatttaccaagtgaaaaatcttcagataataataatgataatgattattcttataaatattataatagtagtattagaagaaaaaaagataataaaaataatgtgcattcgtcaaatttatttagaccccatttatttgttacattgaatgaaaaacattttgctaacaatccaacacataattctttcttaagtaagataaaggtaacgggtccccaagaggttaataataatgctatgagttctgataaaaatcctttatcacatgatttaagaaataatattatagaaaatgaagatcctaaattattagatgataataatttatatcaaatagatatgatagatgaaaatgggaatttaaaattttctttatacccacattatgtgaatatacatgtatgcaaagaaatgattcattataatacttattataatgatggaacggaaaacaagaatagtaatttatataaaatattagaacctttatctaaatatatgcatgaagttaaaagtaattgcttgaataataagaataaattattaaatgaaatacacaatttagaggatcctaaatattataagaacaatgtacaagatgtgtatgatgagaatataaaaaattatcaattcttaagaaatgaatttgaaaaatgcttaaataaatatgatgaaaatattaataaaaaaatttatgaaatgaatacagatattcgaaatatgttaagtaatacaatttgtagaaataatatatgtgatttaaaaaattataatttgattgttgaattatatttatttcacattaacgaattacctgaaaaggcttatcagaatcatctaaataatgcaaaagagcttttggaatttacttctaatgtcataaatgatatggacaagagaatattgggagataagaaaactttatattctattaattttgtacaatcagaaattaatgatattattaagagatataattttcacttaaatcatattaacaagggaataagtgaaataaaacatatatcaacgaatcaagcacgtttacctaatatgaataaaacaatacttatgaacaaaagttttgaacttgctaagaccttttccaactttaaaattagtacagaaattcttgatatgttaaatattttattgagtaggaaaaaaaggcatattacaagagttattaaatactttaatagaagatataaaaacacgattgaagagtatattatatccaaacaatttagattcagaatataagaatataacatctaaaactaaaataacattagaggcagctgaaaagtgtttttcggaaaataagtggaaaataaaagattatgatatgggttctaccttagaaatgataagtgtaaaaaataatggatatgaaaaattatatatattagaaaaatctataaacaaattaaagaaattacttaatgatataaataataaatatcaaacaattaaaaaggctaaaataaaattagacggattagttgaaaataaatccgctgatagtactgaacagaaaaaaaatctaatgaatcttttacatattatagaaagtataaaagaaaatgataaaatacaaaatttagaacattattttatagatatcaataatataaatttagaaaccaatttgttaatagaaaatgtgcaaaattcattaaaccaattaatgaagttaaaggaagatgaaaagaaaaagaataccttaataaacgaaataaaatcaaagatggataatataaatgaaaagttaaaacatatgtatgatattatatatataaatgatataataaataatacagtattagaaattgaaaaattatttgatgaaaattcattagttctaaatgattatataacaaaaaaaaaataagatattagataatataaatattattaataaggatttttttaataacaacaacaacaacaataataataataataataataataatataaacagtgaacatcattatattcataataatttgaaaaatttttttaaagatagaacagattttatagataaaaatgttaattatatatatgaaaatcatagtactcaagatattaatatcatgttaaataatactattagtgaatacaacaaattagagtttatcaattcagacatttttgataatatttctaagaaactaaaaaaagaattacaagatcttgtgacacttaaagaaagcttaatgaagatgaatcacaatgtgttgaaaatggatcctctaaaaagtttaaatcaagtattagaaaaatatgaagaattaaaaaaaaatataaatgaatattctaaagaagaaaataaattatatgattttaaaaagcaaatggaaagtcgattaaatgcatttattacaaatttaaataataatgatgaaaccttagttgatgggaaaaatatttatgatcaatttgtagaatataaagaacaattattaataaaaaaaagaattattataaataatgaaattgttataattaatgatgaagtaaaaaaaattaaggatgaattaaaaagctataatattctatcatataaattagaaaatgatacatctcatgatgtagttaattctgtagaaaatacaccaagttctgatgttgctacagctgtgtctaattcttcatctattctttctacatataattctactgaattgaataaattacgtaacttcttttctgaaaaggacgatgaattaaatgtcgaaagtaaagtaaaacaggatgaaaatatttttattgaaaagaataaaatattcgatgacataataaaagatattgaattatataataagaaaaccaatgcaatcaaaaacttaaataatgccataaatggatctatgaataatttgtccttaattgattcagtaatgaaaaataaaggtgacattataaatagattatctcaaagatcttatttaatacagacagataattttatagatatatatgaaaaaatatttttaaaagataatttaaataaaggtttagaagaaatagaaaatagattatctaatacttatatgaacgaattgaaaatagaagcagaaaaacaaaatgagaaatataagaaattaaaggaaaatataaatacatatgatgatacatttttagagaaattaataggagataattatgaatgggaagttctcaaaattgaattaaatggtttaaatgtaaattataatatattacaagcaaatatagataccttaataattaaaccttatatagaccatattgatcatattatatcattaatagaatctttgaagcataatatagaaaataaaattaagaaggtgatacctaatttagaaaggttaaaagattttattcaaacaaaatttaacacaaatgatattaaattagatcataataatcttattactatacgtattgataacagggattataaccatatgaaacttttagaagaaaaaaaagaggatttatttaaaaatattaatgataaaaaagaggaaatagaaaaactaaaattaaaattagaagaaaacatgaataatactaaaaaggaaatggagaataccaatataagttatggaattaagaaaaagaatttaattgatatatatgaaagtatgagcagtttattgaaatctattattaccactgatgaaaatttatataaattacaaaatgtagatgaatttagattattatatgaattaatattaatagaagagattaatgaaaaaattaaaaatcaaatcaaagaagcttctgtggaacgagtagaaattgaattgtataaagaaaaaattattcttagtatgaataattctataaaggaagatatatcaaaacttacaacattcaaatataatgaaatatatgatgaatgtattacgaaagaaaacaatataaaagagctctatacaaaatcatcttcattattagaagagtcttgtagagataaaaatatggatattattaaaactaacaaatcagttcttgatgaatacttaaagacatctattcaaaataacaatgatattaaaaatagtttagctagtttaaaaaatatgtatgccatattacaatctattaaattagatgcagttactaaatatatcttagataatagttataaatgtgaagaccatgctagagatttagaaatggaattagaaaaagagagtgcgttatcaaaaaatataaaattaaaaattgaaaaagcagaagaatacagaaataaagttttaggatctgaaaaacatgaatcaattgatatatatataagaaatattgaaaaaataaaacaagatatttctgttatagaatctgatataatgacatgcatacaaaatgcttatgataataaaactaaaagtatgttgcactttcaaaatgtacatagaggtatagatcttattggcattttaaataaaaaaaatcaaggagtaatatcaaaaccagcagaaagtggaaatatatcagaagaatatgaaggtcaaaatattaatgattactatcagaagtgtaaaacatattcagaagaagcttcggataattatgatgaaatttcttatagaaaagattctttattagaatttgaaaagaaaataacaaatatattaaatgatgttttaatttttaatatgaaaaaaacccttgaaaataaaaaggacagtgtaaataatattttggaaggaatgaaattaacagcatctataattaatgagaaatctcacgtattgtctgaaaaaataagagtattaagaaatcaaaaaaatataaaagatgatgaagaattattaaataatgaaaaatctaaaatagcatatgaacaattcgaattatatatgggtaaactagaatatgctataccggatataaatcgtttacatgataaggcagaaagaatgtttagcaaagctcaatttttgatgaaacccatgttggatatgtctcttatattagaaaataagaatttagaggaattaaaaaataaagaacatgattatatggaaaatattgaatatatacaagatgaagaaaaacatattaagtatgaattaactaaattaattgaagttattcaatttgttgataatatagaaaatttgttagaaaaatatagaaaatattatgaacaagggaatttagaaaatgtatataacaattctaataatatcaaagatcgtatagaagaaacaaaaaattcattaagtgtattagttaatatattttcatctataaaaaatagcatatatttaaaaaagcatagtgttaaaatggaagatttaaatagttatataaagaaaatgaatgatatatatgatgaattcatggaatcctacaatttgttacaaaaaactattattgaatcttctaatgatgatatagaatatgaagaattaaaacaagtaaaccgaaacatagaaaaatttgaaatacaacttgtaaaagcagaagaagatatgaaattatattggaatagtattaaaaatgatgtatataataaattagtatattatattaaagatatgttattagaattagacaatcgatgtaaatcagtcgatacaatattaaatgaaggttttgattttataaataaatgtgctaaagagagtaatgtttctggtgatgatgataatgtatataatgaattaaataaagcaattaataaatataaagaaatacatgaaaagtctaattttgtttgtaaaaatgaagcagaaagtttgtttggaattattgtaaagtcttcaaatattataggcatgaaaataataacaggtttaggtttagagttaaaagaagatgttgatttaggtactatgtctttattaaattcaagtttacattttcatactgcatctataaataaattatattctaccatagaatctgatgtatatgataaagtaaatgattgtttaaagtcttctcttgatatagtaaaatattcgtttgatattgaaaagaagaaaagacaaattaatagtataatggaagaaataaataacgtacatgctcatattacaataaagattgaactagctaatatgattaatgattctagaaataaaataagtgtggttttaaataaaatatatgtatctataaataaaattaagaatgtaaaagaaatgacatgtgatgatagtagttatcatatgataatggaaaaaggtgaatatgataaattaaaagaatattataaaaattataatgaagaaaaattggctactttaaatgaattgaatacaaataaattaaaagaaaatttgaattcttgtaaaaaattgttagatgaattacaaaacacaatgaaaaacaccattgaagaagaatctcctaagaaggttatagaggatataaaaaaatcatatgacgaaataaatgggcgtattggtaatacagaaatggatgcggaagcaataaatgtggttttagaagaattagttaaaagacaaaataaacgtaaagcatcttggtatacatcattaattggaaaggtgaatactaaaatgtcttttgataaaaagagattggttgatagacaaaaaatatctcaatcgtttttagattctatgaaattgaattttaatatgattaataaaatgattaataagataaataatcattttgataaacatcagataaataattattctttaggtaatgttgagaaaatgatgaattacataaatgattcaaatgagaaaggaacaagtgttatcgaattaattgataatttgacgaaaaaaatatcaataaataacagtaataataataataataataataataataataataataataataataatgatataataaattttataaataatactaaagaaaaccttataacgaattatgaaaatttaggtaagaaagaaaaggatttagaaaatatttatttaaaaatattttttagtaaattagaagaaatagaaaaatcatctgaaaaatatttttatatatctaaagcatttaataatgtggttaaatatcaaggtcaaaaattatcagataatataaataggatgaataatataaaaaatattatagaagagaaagaaaccattttaaataatattaataaaaattttacattagatactattaaagaatttaataaagcttatgataatattttatttcatatgcgtgatttatatgatttagaagaatcaaaatatgatgtaggaagaaaattaaatatatatatagaatatatatatcagataagaaataaatcaaataatttaataaataatttttatgatattagaaatactggatatataatgattcatgaaactgaaaaattaaaaaatgatataaatgaatatatgaataaaataaataaaaatataaataatactaataaagaatttgatataacattaagaaatataaagacaaataattactttgtaaataataatcatgaaattaagaaagtcattgataatttttggaatcatttagatactataaaagcaaacttttctacatttttaccacaaaatgaaaaattggttttaattaaaagttatttaaatgacataaaaaatataatgaatgaacttatgagaaaagaacaagttgatgttagtattcaaacatgtaccagaaatttagatatagaattggagaaaataaataaaattaaacaaaataatgcaataacagatgatatggttgagaatttattttcacttaaagataaatataaaaatgaattcttattaacaaaagatatcttaaaaagagtacaagataagtatcaagaaatgaataagatatatagaacattaactgtaaatactgataacaatgaaaataaatttgccttaaaatatttgagcaatgtaaatgcttttattaatgaaataaaattatctgtaagtgctatggaaacttttttgaatattatagatgggaaaacaaagaatttagaaatccatagagatcctaagttgtatagtaataatccagttactttatcccgtgatggtaagaatgatattgaagaagaagaagaagaagatgaggaagatgaaaaaaatataaacaactcccaagataccacattaagttatcatgaaaatgaaaaagctagacaaaatgaaaatacaaacaaaggacaattattaaatgaagaatatgtaaatggaagtaaagataacacgaaaaattcgaataatggtagagatagatttaattataattattattctaataaaggttttgattacactcagattaaatatgcttcaggatttgctattggtttaattatttgttctagtgttggatttatatttagaaaagaaattaataacagtgaagttgattttaatggaaatgttcaagatttccattttactaaagcaaataatctgagagaaaaggatgaaatagttgaagtaccatttaatgcaaatgattatatttaa

SEQ ID NO: 56 - protein, 2888 aa, Plasmodium falciparum
MRKGLIYRTILCYILLILIEKSHQNNIYKVNGNNENFQFSHLNFYSKNNEGLNFGRSKVSKGSNLPSEKSSDNNNDNDYSYKYYNSSIRRKKDNKNNVHSSNLFRPHLFVTLNEKHFANNPTHNSFLSKIKVTGPQEVNNNAMSSDKNPLSHDLRNNIIENEDPKLLDDNNLYQIDMIDENGNLKFSLYPHYVNIHVCKEMIHYNTYYNDGTENKNSNLYKILEPLSKYMHEVKSNCLNNKNKLLNEIHNLEDPKYYKNNVQDVYDENIKNYQFLRNEFEKCLNKYDENINKKIYEMNTDIRNMLSNTICRNNICDLKNYNLIVELYLFHINELPEKAYQNHLNNAKELLEFTSNVINDMDKRILGDKKTLYSINFVQSEINDIIKRYNFHLNHINKGISEIKHISTNQARLPNMNKTILMNKSFELAKTFSNFKISTEILDMLNILLSRKKGILQELLNTLIEDIKTRLKSILYPNNLDSEYKNITSKTKITLEAAEKCFSENKWKIKDYDMGSTLEMISVKNNGYEKLYILEKSINKLKKLLNDINNKYQTIKKAKIKLDGLVENKSADSTEQKKNLMNLLHIIESIKENDKIQNLEHYFIDINNINLETNLLIENVQNSLNQLMKLKEDEKKKNTLINEIKSKMDNINEKLKHMYDIIYINDIINNTVLEIEKLFDENSLVLNDYITKKKILDNINIINKDFFNNNNNNNNNNNNNNNINSEHHYIHNNLKNFFKDRTDFIDKNVNYIYENHSTQDINIMLNNTISEYNKLEFINSDIFDNISKKLKKELQDLVTLKESLMKMNHNVLKMDPLKSLNQVLEKYEELKKNINEYSKEENKLYDFKKQMESRLNAFITNLNNNDETLVDGKNIYDQFVEYKEQLLIKKRIIINNEIVIINDEVKKIKDELKSYNILSYKLENDTSHDVVNSVENTPSSDVATAVSNSSSILSTYNSTELNKLRNFFSEKDDELNVESKVKQDENIFIEKNKIFDDIIKDIELYNKKTNAIKNLNNAINGSMNNLSLIDSVMKNKGDIINRLSQRSYLIQTDNFIDIYEKIFLKDNLNKGLEEIENRLSNTYMNELKIEAEKQNEKYKKLKENINTYDDTFLEKLIGDNYEWEVLKIELNGLNVNYNILQANIDTLIIKPYIDHIDHIISLIESLKHNIENKIKKVIPNLERLKDFIQTKFNTNDIKLDHNNLITIRIDNRDYNHMKLLEEKKEDLFKNINDKKEEIEKLKLKLEENMNNTKKEMENTNISYGIKKKNLIDIYESMSSLLKSIITTDENLYKLQNVDEFRLLYELILIEEINEKIKNQIKEASVERVEIELYKEKIILSMNNSIKEDISKLTTFKYNEIYDECITKENNIKELYTKSSSLLEESCRDKNMDIIKTNKSVLDEYLKTSIQNNNDIKNSLASLKNMYAILQSIKLDAVTKYILDNSYKCEDHARDLEMELEKESALSKNIKLKIEKAEEYRNKVLGSEKHESIDIYIRNIEKIKQDISVIESDIMTCIQNAYDNKTKSMLHFQNVHRGIDLIGILNKKNQGVISKPAESGNISEEYEGQNINDYYQKCKTYSEEASDNYDEISYRKDSLLEFEKKITNILNDVLIFNMKKTLENKKDSVNNILEGMKLTASIINEKSHVLSEKIRVLRNQKNIKDDEELLNNEKSKIAYEQFELYMGKLEYAIPDINRLHDKAERMFSKAQFLMKPMLDMSLILENKNLEELKNKEHDYMENIEYIQDEEKHIKYELTKLIEVIQFVDNIENLLEKYRKYYEQGNLENVYNNSNNIKDRIEETKNSLSVLVNIFSSIKNSIYLKKHSVKMEDLNSYIKKMNDIYDEFMESYNLLQKTIIESSNDDIEYEELKQVNRNIEKFEIQLVKAEEDMKLYWNSIKNDVYNKLVYYIKDMLLELDNRCKSVDTILNEGFDFINKCAKESNVSGDDDNVYNELNKAINKYKEIHEKSNFVCKNEAESLFGIIVKSSNIIGMKIITGLGLELKEDVDLGTMSLLNSSLHFHTASINKLYSTIESDVYDKVNDCLKSSLDIVKYSFDIEKKKRQINSIMEEINNVHAHITIKIELANMINDSRNKISVVLNKIYVSINKIKNVKEMTCDDSSYHMIMEKGEYDKLKEYYKNYNEEKLATLNELNTNKLKENLNSCKKLLDELQNTMKNTIEEESPKKVIEDIKKSYDEINGRIGNTEMDAEAINVVLEELVKRQNKRKASWYTSLIGKVNTKMSFDKKRLVDRQKISQSFLDSMKLNFNMINKMINKINNHFDKHQINNYSLGNVEKMMNYINDSNEKGTSVIELIDNLTKKISINNSNNNNNNNNNNNNNNNNDIINFINNTKENLITNYENLGKKEKDLENIYLKIFFSKLEEIEKSSEKYFYISKAFNNVVKYQGQKLSDNINRMNNIKNIIEEKETILNNINKNFTLDTIKEFNKAYDNILFHMRDLYDLEESKYDVGRKLNIYIEYIYQIRNKSNNLINNFYDIRNTGYIMIHETEKLKNDINEYMNKINKNINNTNKEFDITLRNIKTNNYFVNNNHEIKKVIDNFWNHLDTIKANFSTFLPQNEKLVLIKSYLNDIKNIMNELMRKEQVDVSIQTCTRNLDIELEKINKIKQNNAITDDMVENLFSLKDKYKNEFLLTKDILKRVQDKYQEMNKIYRTLTVNTDNNENKFALKYLSNVNAFINEIKLSVSAMETFLNIIDGKTKNLEIHRDPKLYSNNPVTLSRDGKNDIEEEEEEDEEDEKNINNSQDTTLSYHENEKARQNENTNKGQLLNEEYVNGSKDNTKNSNNGRDRFNYNYYSNKGFDYTQIKYASGFAIGLIICSSVGFIFRKEINNSEVDFNGNVQDFHFTKANNLREKDEIVEVPFNANDYI

SEQ ID NO: 57 - DNA, 21715 bp, Plasmodium falciparum
atgaataattatatttggaataacacatattctttagaatttttaagtgaagacttttatgatttgaatattagtacgaaagacaatgtgtacgaaataataaaaaaaaaaaaagacgagaatgaagttgagagtttgagtataaatatcagtagtcatatatgtatgtttgttcaattaatagataatataattgggaaattaagttatagtaatgacataataaatgatacattaaattataagaaattgtctgatgtttttaattttataaaaaaccaattatataattgtgattatagtttatttttaagaatttattcaatatatcatacttataatcatagaaaaaatggatacttagatgtcaataatttatataacttcattttagacattattaataaaattgaaaatttaaatgaaaatcattttttaatattacctggaggtttttatttacagaaagaaaagatgttagtaaaaattttatatattatacacaaaaaaaataatttatatagttttgcagtattaaacaattctatatatggaacacaatatcattcatttaaaatcgacgatatagacaatttaggtattttattaagagatgtagtattgtgtataaagaatattcagaaaaattatttaacaaattcattgttttggttatgtctatatcgtttatatatatttcctaatgctgataatgtagacatattgtatcaaatattattgccttatttaaataattcttttcttacaaataattggaacatatgtgataataatacaataaatgtggtttctgatgaaaatggttctaaagatcattcgaatggtcttatgaacacaaataataatataaataattccaataacaacaacaattttaataataataataattataataataattttaataattataataataacaacaattataataacatttataataataatacaccatttgatatgaatttttcaaattttaataataatttaaataataacattaataatgtacaagccaatttgggtaatggaccaaattatatgaacacgtcaggtaataattttaacggtttcgataattttaataatataaataatttaaatgattttgatgtatggaataattttaattttaataatagtgataaatttccaaatgatttaaattattttaatgatttcgatttgaatgtgtttcaaaataataataataataataatgtaatgatggctagccaaaatatacctgtccaattttctgaacaggcaaggtataatgataataaaaatgtgagaaaaaagaaaattcgtgagaagtatgagaaatatggaggtatatatgtaaatttgtataaagacaaatttacttcattttcaatgagtttatattatagtatgatatatatgttaaaggttatgaacattgaagaggaagatattgaagtatttaaaatttttatatattatagtattatattaaaattgtgtgacgatttaatacgatacgaatatatagaaaggagaaagaatgaaatgggaaacgtaaggagtagtcagcatgataatagtaataataataacaacgaagttaataataataataacaataacaatgttaataatttttatggtagtcaggttaataattataataataactttggtcataataatgtgtcatctatatatagcaataataataatagtgaacttcacaagagtgaaaataagaacgatcctaatagaatcgatgatatattttttgtgtttttagatatgagtgtaagaaaattgtgtgtgttgtttcatttatacttttgtaagatgaaggttgacgtgtacgataaaagtaagatgattagaagtaatgtgttgaatgaaattatgaagaaaatattatttgttaaatatatgtataataagatagaattaaaaatttattcagatttaacattaaatgttgatattattaagaataggaattatgttaattctataaaatttcctttgtatataaaatttgaagaagaattgtttaaaagttatcgtaaagttgagataaaaaaagatataaatatgcctatatcattttatatatctcgacgtaatgttgaaagttttaatgatttatatgtgatattatatgaaacaaatttaattacaaatatcttaataaatcaaaaaagttatataaaacattgttatatattagcattctcatttattagtcatgtattaaataatgtaataccttctactaaacattttatttatttgtcaaaatatgcaaaattgaaaagaggtttacagttgagtattttttatgaaatataccgtatgtataacaatatatattttatatcatgttcattacatgaaaataaagaaatcgttatgtataaaataattaatagttctatgttattatttttatatgatttcttgttacgagttaaatgtgtagatgtatgttcaattttttcaatacattataatggttttacgaacgattctagttattatatgaaccaaaagaggcggaaaaagcaaaagaaatatataaaaagtaaaaatgatagaaaaggaagtgtggtaaataagagtaagtataatgacaaaagtagtaataactatgataataaatacaacaaatttaaggataggtacaaggatagcatgatacataataacgtgaataatatatcgatgagtagttataatagaaatagtgatataaataatagtagttctaataatgagtataacgatgactcttttgtttatgataatataaaaagattgaagaaatgtcgcaactttaatgataatgatagctattcctctctagacgaattagcacatgcaagtgaaggtaatattagattatctggttattgtatcgatatctctgtgttggaatgttttagtaacttctttttaattataaaccctaaattaaatataatacgatctgatgttatagaatatttttacaaaatcaatgaaaagaaaataaataagaatagtcaattatttttgtttgaaaaaagtaatgatataaatagaagtgaaatagaaatattagaaaatatgagtttagatttaggattcgataggaagaagaatgatataatagaatattattgtggtgaatgcattttatttaaaaatttagtaccagaattttatcatttaagagatatgttatttatatttaaatcatatatgtgtccatatatagaaaagttaccacaagtaaaagtgtataaatatgatgatataaatttaaaatttgaatataagaataaattaataataagtgtatttaataaaaagatcgatatatgtggatatatgtgtccaccgaaggatacaaaatttaatttcttttcttatatatatcaatttattcaaacacaagaaaataaaaaggataattgtatattaacatattcaaatccaaatatgtatactacggatatatatattgaaaatgaattggatgtattatatgttaatgatttaccatattttcatccatctttagatttgagagatgtagaaatcttattacaatatttgactgtaccatatatacgtataccattaatattagagtttttttgtgataagaatagaataaagagtttcgaatcatttgatatacaacagttaatattatgtattttatttgagccttatatttttaaaaataaatataaaaatgtagaagaagataatttcataccttctaaggatagaaatatatttgctacaaaatatggtttattaataaacgaattaatacatagtccaaaaaatgtattatgtagtgtctattcttatttagaaatattttttagttttgataataacaatagtataaatcaaaaggttatatttatatttataattattataagttcatacgttaattcttatataaaattagttttagagactaataaggaaatacgcagaaatttgaacaatattgaaaatattataaataagaataagcttatcaagaaaaggaaatcgtatagggaaaaatcgtatcctcataaagatatcataagaccctccgaagaagaaaaagaaaagaaaaaaagaactatatcaaattatggtaattgtgatattaagaaggataataatggtattaataataactctgaggaacatattaatggtattcattttgatggtaatgagcgcacgtattataaatacagaaaacatatagaaaaaagagaaaggaaacgaatgtttaactttttaaacaaacttaaaaggaagctaataaagaatgatttatattgttctgatgatgtcttaatgaatttggaaaaatattataaaatgataaaaaaaaaattacagaatgatgtattaggtttattattaaaaaatattcagatgtgtattcaaaagaatgatataacaactggtagtatattttatggttgtattttattaatatatcgagatataaaatttagagaattaaataagaataatgtaaaacatattttatcttctatcttttttatattaacatattataatttcagtgcagaaacaaattattcagatttaaaaaatatatatggtttgggttctttatttgtaaataataacgatggtactaataatagtaatattgtaggagaaactagatattctttacaaaagagtacgaaattatgcacaaaagaaaatagctataatgagacagatagcttttctcttttaattaaaacgttttctttatgtgaatgtgatttatttatatctatacataagtatagaaatatgttattaaaatatttggaaaagaatgaattagatcggaatattatatttgagcatacgatacatatatgtgcatgtgtccatgacaatacacataatgataataataataataataataataataataataacaacaatattggaggtagtgttaaaaaaaatgtgtattataataatagaatgaataaacataatgctaatgttttcctgaattttcgtacgaacgataatattataagaaaatggctacctgtgcataaatttaagcatgtaggaatatataccattgaagatataaagaatgagaaaaataaaagaaaatatttaagtaatacaaatgaatatttagaacaggaagacaatctaggaagacatacaaaaatgacaaaaaattattatgataatgaatatgtaaaagataataattatcatgacatgaataggaattattattttacttcatctagtagctcttcttatgatatggatgacgatttttcgtcgtcagaggaagatagtagtagttataatgatgagatatcgttatcgttttgtgaggataatatgaatgaagatattaatgaagatgaaaaaaaaaaaaagatgacaggtaaggaagagcaaataatagtacaatatgaaagaaataatatggataatatgtcatatgatataatgaggatggaaaaaaatgagaaaaagaagaaatacaaaaattataataaatatagtaaaggtatgaaattaaaaaagaaattaaaatatgacaattatattgataataataataataataataataataataatagtgatatgaagaaaataaatccattacatgacacagagtccatcaattctaatgttatgaataattatttaagcttaccttccttttttaaaaatagttattataataaagatgataataatatttcatataataataaagtgaagagaagaaaaaatttaattacaagaaaggatagtatattaagtaataataaatatatatcgtatataaaaaatataataaaagagaaaaatatcttaattaatcttcaattatttacattttcttataaggataataatataataaccttgaatgataatataacaaaatttaaaaattatagggatgtatttttaaatggaagtaagaattttatgagtatagaaagacgaagaagaggttatagaatgaaaagacatatgaaagtattaataacacaatcttatcaaaatttttgttcatttaatataataggaaagaaacataatttagaagtgtggagaaattcaagtaggataacatatcataatttaatgtcttatccttttaataagtctaaaatattttatttaaaatcatcatctcttttgaataatataaaaactgtgaacaataataataatttaaataatataaataatataaatataaataataatgctcaaaataatgatcataataataataatacagtgggacgtgatgaaagtcttatgattactttcaacaattttcttttgaatgaagttaaatgtggtgtattatatgaacaggaaaataatgatatatacataaaattaatatggaaatataacatgaatgaattggaaagacttactaatgagaataatataaaaagtggtaataataaaaacacgggtgaggacaataagttgctggagaatgatatgaaagatgaagaacataggaagatgttaaaaagaaaaagaaagaaagaattatatgacttaaaatcttttaatataaattatgagacacaaaatattgaaggtttatttaattttaaatacgaagaaaatcaatatgatagtagtttgataaataccacaagtgaatcctcatatagtaactgtagttcatataattctgtatccaaaagaatgttaaataatataaatgatggggatgaaaataaaagtgatatatcttccaaatcatttagtagtagcgtacttatgatgatgatgatgaataataagagttcttcaaatttatctagctcggatgataacatcattataagtaataatgataatatgaataaagataatattattaataataatgatatgaatgagggtgtttattataatgttgatataaattcaaaagaagtagacccgatctataaagttaataacgaatctgtacaaataaattataataataaaaaaaatgaagattatattaatataggaaataataatttaatgaaaaaaaaaaaaaaaaaaaaatatattactgatggtaaatgtgattctttattatatacgaatgatgatacgtttaacgaaggtaacaaaaagaatattattaatatagatttaaataaagaaaaaaaaaaaaaaaaaaaaaaagattccataagtaaagatataaaaaagaagcataattataagaatcttatgaatttaaatatagaagaacatggtttacgagaaataatttatcgtaaggatgtggattgtatatttatatataatatattttttcatatgaatcgatttataaagaaattatattattgtagtgatataaagaaaatatatttttcgacaagtattaatagatgtaagaatttgttttatcattttgaaaataacaatgtacgtttgtgttattataataacagtgaagggtatgaaaaatatcatgttaatatatctcgaaatatatataataatatacaagtacagaattatatgagtccaaattatttgtcaacttttgttccttccatattattaaaaaattataatttttggtataataataatgataatagtttaattggtgaaataaaacataataagaaaaataagaaaaacaaaaattttattatatatattaagttgtttaatgataagggagaaaatcaatatgacacaattaatagtaataaaagtgttggcaataataataataataatattaataataatgagaacaatatatatgttaatgaaagtgaaaaacgaatgaacacaatatttaatcttatgaacaattcaggtgagaaaaaaaggaatattcctatttatccctatggtgttatacaaaaattaaatatatttaactcaagaaaaatgaatgaacaaaaaattacatcattaaaagtgaatgaagaatataaagctttaacacttataaatatattaagtgttgagaataacaatgtgtataaggatttttataatatattaaatagatttgatcatataacatatatattaatgtatacattgaatgtacctatactatttaatgataatacatttacacaggatagtaataaaaatagatatataaatgatgatgaaattaattgtatgaacataaatgttgatataattgaaatcccacgtttaaatttaactttaaaaagaaataatatcgatataaaaataaatacaaatgaaaagaagagtattgattatgtagataattataatgagaaatctggtttaggaagaaataagaatacaacaaataatagttgtatgaataataatataaataaaaaagaaggatgtaaatattattttgaagagttaaatatgtttatatataatggtaatatacaaaaatataattatatatataatgtaataaaaaaaatgaataatactgtattattacaaaatcataaaaatgatttttttttcttagtatccttattaaataaaccattttttttaaatatttctactttgtacaaagaatttaataataaaaatatacatttatgtacattgttagaaaagcatataaatgtattactaaagaattatatgtacgtaagtatatattatcacaattttaatataaatacaaccaatggtaataaatatttcgatttattaaatgaagattataataataatggtaatggtcgaaatggttgttccttacaatatattgtattatctatacatagttcaaaattatttttgaactttagaaatttgtatagttgttttttttttattgtatataagtatttaaataaggagcatgaagaggttatagaatattgtaataatttaagtatatgtaaagaagatataaatgaaatcaattatttattaaatattttaaattattgtgattattctatatattcagatgttgattcttgtgcatgtcgtttgaaaattttcctcacattatcaaaacagataaaaataatattacagaaaaagcgatatcgaattaatagtaagaaaaagaactcatgggatgtaaacaattattataatatatttaattatgtaaaatcgttgtggaatatagaaaagaatgatgaccaggatgatagtagtaataatgaattgtataatactaatgattattatataaataagagggcttataaagataaatattatatgtttgataagaataaaggtagatcccatagtacaatggggcatagaaatatatatacaagtaagaataaaatgaagaataagcataggaatgataagaattattatgataaagatgatacaagaaacaatgtacatacatctgacgatagtaataatagtagtatgtataatacattgagtaatatttcttcgtcaagtgatgataataatgtatcctctgaaaaggatattaaaagaaaagaattggatgctgaagaaaaaattaatgaagatggtgatgaggaagatgatgatcataatgatatcaataataataataataataataataataataatagtaataataataatgttgataccttaaaaatatctaataaaaagaaaagaaaaaaattaaaaacaaaattggttggacgatcaggtgatgaaaagagtaaaaatagaactaaagaacattttaataataataaaaagaaaaagaataatgttaataataataatgtaggtggtagtaaaaactttatgggtaatcaaaatgtatattataatgatgataataatatggattctattattgtttactgggatatatttaaagatatcgttttttatattaataatttattatatataaaagcaaaatgtaaattaactattgatgaagaaatatttttatatcaaaattgtaatattaatatacataaacataaattgatttataatagatatataatattgaatagtattgtagaatctaaattatcatcaaaaaatgggaaccccttatttttttataatatcctaaaaaagaaacaaatagagaatcaaaagaaaatgagaaattatgaaatatgtaaaaataaaaagaggaatatttttgaaaatttgtataataataagaatgaagaatgtaaaaaaagtaatattcacgacatagatggtaaggatagtccaatggataattctaaccttggatatggaaataataactatagttctaatatgttatatgataatactaacaattcttgttttataaataaaaaggaaaataatataagttttttaaataaagaagaagaagaagaaagaaaaaaaaagaaagaagaaaataaatacaagttactaaatttagatagtataaaagataatttgttacatatgaaagaaatgataataactaaccgaatagaacagaaacatgcagatttaaataatttagtggtatctattaatgttcctaaaatagagacagtaaaatatataaataatattgatgaaaatatttttatgaatattaatttatatgataatataggaaacattattaataatataagttataaaaaattagaagataagaataatgtagaagcattaaattatttaaataatttaattaataccataggtatacataatttttttgttatatataatttttttattaacaatttgaatattaaaatagttaagggggaaaatacctttttatatgctaatttattatctcgatttttatatttttataattataatataagtcagtatagtaaaatcatatatatatttatatttataataaatcatcaagaaataataagtatgttaccaaaaattgatgatcaaaaattaaaaaaaaattatttgaatttttttaaaaccaatgattccttatttaatttttttaacgatatatttaaatttgtacaatcatatcaaacggataaaaaaaagaaaatagataaaaatattatccctttaaaaataaataataatattaatatatccgtacgtgatccaatgaaatatagattaatcataaatataaatgtggatgattatttatgtgaaaaacgaattattagaccattcgaaataaaaaatggcttctatgtagattctgaattattaaatgaattatgttttagtccattcaaaaaattatataaatacttaagaaaaataagaaataacaaccaaatagatagtgtactgcatgtaggtatagatacaaaattaaatcatgataaaaaggatattggtacagtagacaaggaaaaaaaaaatatatatatggagaagacatgtgtaaatatagaaacagcttttaagaataacgattcaaatgttatgtttgatgataatattaataaaaaaaaacaagaagaaatgattatacctacgatgcatgaaaataacgtaaaaaaaatttcgaatatgaatgaaaaaatggataatgaggataagaagagaaacaaaatattaaattttgattttgagaattctaatttttcttgtcagaatagttattcaaaaaattttataaggaatatgaaaaatgattataataaatatttggattaccaaaagaaaaaaattgattatgaatttattggttttagtgtggaagaaattaagatgacgtttaacaatataaagaagttgaaggaatatgttaatatgtttgtatgtataaaagatatattattagaaatatttatgggagataataaattgttagaatgtataaatgaatatatagacgattcaatgtatataaataaggattttattaaaaaggaaaatgacaacaacaataataataataataataataataaaaataataataattataatagtagtagtagtagtagtaatttttattcttttgataagaataataatttgaatgattatagtttatcgagtgatgaagatataaatttattggctaataattatttatataaatttggtatattaggaaaagcagaaaaagaaattaatttaaagatattgataagctgttttatgtcgaaatatgcttatgaatatttaatgcttattaaccctaatttgaatagaagtcattcagaaaaatatataaatattattttgttgtatatgttaattatgaatagaaaaatctttttacatgagtgtataaataatgtaataaatatattgaatatatttaaggtatataatttgaagttgaaaatattaaagcaaagagaaaaggcatacaaatcaaggacatcactagcatcaacaaatagtagtatccttaacaataataatgatagtaataataatagtaataataatagtaatatacatatgaacagtgaacatgtgaatgttcttaataaaattttaaatatccaaaaaaaaattattaataaagctataaataccataaaattaggtacgaaacaattaactcagcttactactaccgaaagacattacttttctttaagaaatatttctaataataaaaaggtgctatataaaaatttagaatataattcagattcttcagatgtatcttcctgttatttttctagtgataacaatgatttggatgataaggagaacacgatgaatatcatggagatgaacaatggaatcaaccaccacaataattataataataatagtaataataataataataataataataattgtagtaataatcaagatgaaggaaatgacaaagtaaataattcttcatgttattatataaaatatggagagaaagattttaatgttaattattattatacatatgatcctagactacttatttttgaatatacgaacaatttaattattagaagaaaacaagtaaaaatgattaaaaagttaaaaagagattttataaaaaagaaaaaacaatactgttatcaaataattatgggaggtggaaaaacgacggtattatcaccattatattttttaatattttcaaattatttcttaatatttaatatgtgtcctcatccattaatacattttacaatgaacagtttccgttctagattttcctctattatcaagaaaaatatattttattttaattttagtcgttataataatataacgacagatttatatattagtttatgtagtgctttagaaaataaatatatattagtaaccagcccgacatgtataaaatcattatttttaaaattaatttcaactatacaagaattaaatagtatcaaaacatttgacatgttaaaacaaaaggccaaaacacatattacagatgctttaaccaaatttttaggttttcagaatgaagaaacgaaaggtataaattctggtgtatcaaatacgatgtcattagcaaaaactagtataaataacaacaactataataatattaataataataataataataatattactatgggtacacaattttcaaagaatggttccatgagctctattccttcggattacaatatgttaaagaaacagttagatttatgtgttcgtatctttgacatattaaataagagtattttattaattgatgaagtagataatgtattacatccattaaaaagtgaattacattggccttacggtattaatagagatattgatttagtaaatgtagtacgaaattttacagatatatttatgaataatccatatttaaaatttttatataataataaggatgatgaaaatgtagatatcaagaatgtaaaaatttcgataactaatgagatgaaggcaaatgataatttgatatataatataaaacatttgaaggagaatgaagaaagagagagagaacaaaataaattattaattaattataatacagatcatatgttaaaaaatgaatataatatgtataataaaatggaggatatgataggaagacataagaattcgattgatttaggtgaaaagcatattatgatgaataatatgaattattcaaaatataaatctcctttatataataagaagaaagaagatttatataatgatcatcatgatgataatattataaataataaaagtacaggatgtgtagtaacaagtggtgatattgtcaaagcattgaataatacagagaaagatataagttttactcatattgatttaagtttatttagatataaattatgttggattttaatcgatttctttttctatcctatatgtaaaaaattgactgttcctatgaatgtacattttaatataaatgctgattatattaatgatttgttattagtttttaataaggaagtagatatcggtgtaaagaatcatgatatttcttttataccacattttcatataattaattataaatggtatgataatatcgtatggattttagctaggtatacttattattttttattatcgtataagttcaatggtttatcacaaaagattgtggaatcgtatttatgtattcctctttgtattggatacaacgatattgtaagtaataaaggaagaaataataatggaaacatgaattatgctactatgagaagattattaaatataaaaaaaattcacaataaaaattataatatgaatataaataatgtacatatgaataacatgaatgaatctgatatttgtttttctaatgattatcatttaaaaattttcgaaaaaataaatcaacttgaatttgtattttgtaaaatgttaaatttatgccgtctatatattaatggaatattaccattcgtatttacaaaaattaatacagtgcattatggtatattatccgttgaacaaattaataagtgtaaaattattatgagtaaaagtagatatttcttagcagtaccttatataggaaaggatacaccttctagtatgtctgaatatactaatgtggatgttgtagtagctttaactatattatcgtatagatatcaaggaatgaggtatgttgattttatgctgtctcttaagaatattttgtataattattcattagaaaaggataatgagcatatacaaaaggatacatcagacgatagttctgatacgactttgaacaattttataacggatgaaagttcaagtgaatcttctcattctactaaagcgttgtcagaagattctacatctaggaaaagaaatatatccgagcgaagagacaatatatcccaatctttaatatcaaaaagtatagacaatgtgaatgattcggaaaatacagaagaaagtttgaatgaagaaaatggacaagaagattattcttccaatattgaaagcgatgcatcttcttcttcgtcatattatagttcatcggatagtagaaatgatgtgagtttaataaatttgggaaagtctaatgacagagttatatcgtcaacttgtgtaaaagatatgtccatagaagaggaagcaaagattaatggagacatacaaaaggaagtaaaacatgacatatttattcatgaagaaaataataaaaagaaacaaaataataataataataataataataatagtaaaaataatgaaaagttaaacaagagaaagaagaagaagaagaagaagaagcatataaataataaaaaaaacaatgagcatacttttaaaaatgatgaaaagaaatatacgaatagaagaaaaagaaatttatatggttccaataatgatgataataataaaactaatcagagatatgttgaaataaaaagcatgtatactttatataaagaaataattgaaagtagtggtgctaaaattttgaagactaagaaatatattaataatagtaatttttttgattatgataatactgtaaaaagaagagaagagaaaaaaaaaagtaaattaggaaattatgtagataatatagataaaataaatttaaatgatagtgaaacattatataatctatacaatttgataaaaatgaatccattattaattagttatttcttattaggaattatattagaaaaatatattaaacatacagaaaaacaattatcatcaaattcacaagattttacaaataatattttatttaaatatgtattaggatatagtggtactagtaatgatattttacctgaagaaatatgtaaatgtaaatatgaaaagcgaactataggatccatattgaatattattaatgatacgaacatcgttaattttatatttttaccatctaaattttcacctattcaaatattaaaaagtttaggatattctaaaataaaatttaatagtttaatagacacaggttatttaattaataatatatctcccaaaaaagtggcttactacattttacagtttcttgattatattgattgttgtatatatatagataatggtaagcacatgtgtatgttacctatggaaaagcgacgtttaaaaaaaagaagaaggaaaataaaaagaaacaagaacggaaagaatatccaaaagatggaatgtgataatgaagagatgattatcaatcctgatttattgatgaaaggatatcaatcaaaaaatgagcagaatgaaacgaagacgaatattgttaaggaaaatgatttatataaaaagaaagtaaaaaaatcaaaaaaaagcaaaaaagaaagaaaatctaaaaagtggaactcaaagatagaggataatcttaattttagtgttgaaattattcctttacaagattgttatgtgccaataaaacgacgatttatatattttgatcatataaatacttttggtcaggatataaaacaatacattaatgcgaatagtttagtaactgttaatataggtaatgatatctcatcatttagtcaaggtgtttttagattgagatcgataggtatgaaccaaaagatttttttcttaatacctttgtgtcttgtgaaattaatgaatataaatacgaatttgtttaacgaattaatatattcgtcttttatgaaaaaacacgatacaaacgatgacaaaaataataataacagcagcaataataataataataataagactagtgtcatggggaagaggaacaaaataaatatcatgaaaaaatttcagaggtctaaaaaggtgataataaaaatgtgtaataaaaattatagtgatgatagtaaatcaggttctgattcggatcccattctttttagtagtacagatagtagtgatagtaataatagtaataatagtaataatagtagtaatagtagttatgataataataataatatggagaattatatgaaggatgtggaattatttagtacatatataaataataataacgagaaatatattttaaataatgattatattgatgaagaaaatatgctttatatgatggattgttataatagtatctttttagataatgaggtgaaagagaatgtattaaaagaattaacccattttttaattttaaataatattaataataatgtaaaacaatgtgaattattatgtgtacatggtattgtaaatttaattaaaaagaaaagtataaaaacattaattgataattatataaatattggtgtcataagttataaggaatatttagatatatttaatactagtatagatttcgatatacaaacacaagtaccatctaaaaataattcattattatgtatggttcaacttatagagaaatttcataaaatttttactgcacaagatgaattatatatacaagatattatatataaatatttttgtttacattatgatttttctaataaaactatttatatgtattttgatgctttttttccgaaaaaatattttttaaaaatgaatgtgtcacaagtaatattagatttattcaacaaattgaagaaaattaaaaaagataacttgatattaaacaagaaaaaaatactcatgaaaacatctgacaataattgtggtatatataataattataataatgatgatgatgatgataataatagtaatatagataatcatttgtttagtatggaaaatgaacaagaaaaggaaaaggaaaaggagaaggaaaaagaaaaggaaaaagaaaaggagaaggaaaaagaaaaagaaaaagaaaaagaagaagaaaaaatcgtagatgatccaaaaaagaaaaatataaaatataaaaaagatgaatataaattatatcattggactgtagacgatattaatattgacttatatggcatgccaaataaagatcatattaataataaaagtacaaaaaattttatgaataataaaattaatgaaacgtttaaaaaattaagagatgatgggccattatttatacctttgaacaaaatgtgtgtgaacgatatatatttgaactttccttcctatatatatgtatctaaaaattttataaataatgagaatataaatacgaaaagggtaaaaaaattgaagaatgtgttggtagttatagagtgtgtttataataacacgaaggggtatgatattaacatggacgataagaacaccattaataatgtgagcaatatggataatatgaacagtatgaacaatacctgtagtatcaattatatgaataataataactgtagtatcaattatatgaataataattatgatgtatatggagaaagagatatacttaaaaatatttggaatatattaaatgaaagcgacaatattgaagaaatgttaaatatattagatattaacgcatttaaatattcttatgatttatcaaatgttataagaaattatttagataagaatagaaatgtaaataataattcttttataaattttacaaatattttgaatgaattggagttatatttttgtaacggtaacaagaaatatattattgtaagtttacaagaagcagagacgttgagatatcatgtacataaaagatcgaacattcaaaaaatttatgaagccttttttaggagtacagtacatgtgaataataaggaacaaataaaatgtatgtataatgataaagaggaagatcaaaatgtagatcaatatgtagatcaaaatgtagatcaatatgtagatcaatatgtagatcaaaatgtagatcaatatgtagatcaatatgtagatcaaaagaatcatgagcattttaaaacatccaaactttgtgttcaggataatattaataataattataaagagaaggaaaatatgaacatatttgatataatagaagaaaaaaacaataataaaaagaaccacattagtaataataatgttgttgatgtggacataggtaaaaacatttcaaacgatatagatacatatattaaggataatatgaatgatgataatttgttaaatgatccttggggattacaagaaaatattcctaatatcaatttgattggtgataaatcaaatgatagtatagataattttttttcaggaaatatggataaaataaataataaaaatattgttgaacataataatatagataagatagataataaaatagaaaagaaagagaatacatataataagaatattctagatataatgaatattaaagattgtggtcaaaatatgttaattgcttgtaataatattaatataaatatttataattataatttttggtttactcctatagaaattagtgataagaataatttaagaaaatatttgtcaagacaaatacaaattgtttatagtgtttgtaaattttttaattctgatcgtaaatttattgatgctcatgtaaatttattattacaatatttaaattttaatccacctaaacatcgttttaattattttaacgaattatatttaataagaagacttatgaaagaaaaccaaaatagtggtcttaaaaatattgaaaagaatttttatgcacctaaaaaattacaacttgaaattttagagaaaaaattatttgaaggtaatggtgatatatacgcttttaaagttattcaggaaagggtaaggcaaagtttaaaagggaaaaatttaacattacaaaaaatatttgaaaaagatttaaattatatatgtactatggaagatataagaatagtattcgattatttaaatataagggataagaattgtattaacatattatttgatgtattaggaagaaatattactctgcatgaattatgtttatttcttaatcccgtagaaaatagaagagataaaaagtacaatcgtttagaaaaaaataaaaggatgaatggaaatatgctacagaatgatatgaattatataaataataatatattacaaacacaaaatataggtattcaaaataaggggaacaataataataataataataattacattgatcatcaacataataatcttataagagatatcgaaaaacatttaaagaattttagatttagtttaacagaacatacacatatgaaattagtatggtcaggaaaaatagcacaccagagaatacatcatgatatgacacatgagaataataaaaacgaaatgtgtagtatgaataatataaatccttcatcatataattttgctaaaaatgaatcacaccacaacaatatgaataataacaagaacagctttagtaataataataataataataataatcaatatgattatgtgaagaaatcatcaacaaatgatttaatcagtgatatattttatacattccaaaataaaacccataatagagatgaaataaatctattaagtaatacaaatcaacaaaataatattaataagatgtcatataatgaggatatgttttatatatatgaagctgaaaatgttgatccaaaggatagaggaattatgagtaaaaataaacataaaattgtatgcggtcattacgcatcaaataaaatgtatgatattaataataataataataatataaataataattgtagtaataatatatataacagtattaatgcttttccaattattgaaatgacggatattactattaatagtatgtatacaagtacatcaggaaatgatatgctaaatttattatttccatatccaaaaaaatatcttttattatggcatgaagattattctttaaaaaatgtaaatgaatgtttacatatatggaaacctatcttgtcttcttcagctcatttttccaataatatttttgttggtcatgtagctacagtaggaccacaaagcccaccattaaataaaattagagctattccaaaggtacttgtaaaaaatgttcaatcaaaaaaatattccactttttttgcggacaatagttttgctattgataattctggtgttttcagaacattaaacatacacttttttagtaagttcaaatgaaaaaaaaaaaaaaaaaaaaaaaaaaataaaaaaaaaaaaaaaaataaaaaaattcaaatatgtgtatatgtattacatatgattatttattattattttatgtgaacactaatatttttttttctttttttttttcttatttttttttttagatggcttggagttcaaaaattatgaagaattttcctttaggaacttttccttaagtattatttccaagatgaaaaaaataaaatctgtgaatgaagatatatttaatttgtggggagatgaaaataatgaaattgaacaagacgaagatgacgaatcttcgtcagaatgggaaattattgcgcaacctttttaa

SEQ ID NO: 58 - protein, 7182 aa, Plasmodium falciparum
MNNYIWNNTYSLEFLSEDFYDLNISTKDNVYEIIKKKKDENEVESLSINISSHICMFVQLIDNIIGKLSYSNDIINDTLNYKKLSDVFNFIKNQLYNCDYSLFLRIYSIYHTYNHRKNGYLDVNNLYNFILDIINKIENLNENHFLILPGGFYLQKEKMLVKILYIIHKKNNLYSFAVLNNSIYGTQYHSFKIDDIDNLGILLRDVVLCIKNIQKNYLTNSLFWLCLYRLYIFPNADNVDILYQILLPYLNNSFLTNNWNICDNNTINVVSDENGSKDHSNGLMNTNNNINNSNNNNNFNNNNNYNNNFNNYNNNNNYNNIYNNNTPFDMNFSNFNNNLNNNINNVQANLGNGPNYMNTSGNNFNGFDNFNNINNLNDFDVWNNFNFNNSDKFPNDLNYFNDFDLNVFQNNNNNNNVMMASQNIPVQFSEQARYNDNKNVRKKKIREKYEKYGGIYVNLYKDKFTSFSMSLYYSMIYMLKVMNIEEEDIEVFKIFIYYSIILKLCDDLIRYEYIERRKNEMGNVRSSQHDNSNNNNNEVNNNNNNNNVNNFYGSQVNNYNNNFGHNNVSSIYSNNNNSELHKSENKNDPNRIDDIFFVFLDMSVRKLCVLFHLYFCKMKVDVYDKSKMIRSNVLNEIMKKILFVKYMYNKIELKIYSDLTLNVDIIKNRNYVNSIKFPLYIKFEEELFKSYRKVEIKKDINMPISFYISRRNVESFNDLYVILYETNLITNILINQKSYIKHCYILAFSFISHVLNNVIPSTKHFIYLSKYAKLKRGLQLSIFYEIYRMYNNIYFISCSLHENKEIVMYKIINSSMLLFLYDFLLRVKCVDVCSIFSIHYNGFTNDSSYYMNQKRRKKQKKYIKSKNDRKGSVVNKSKYNDKSSNNYDNKYNKFKDRYKDSMIHNNVNNISMSSYNRNSDINNSSSNNEYNDDSFVYDNIKRLKKCRNFNDNDSYSSLDELAHASEGNIRLSGYCIDISVLECFSNFFLIINPKLNIIRSDVIEYFYKINEKKINKNSQLFLFEKSNDINRSEIEILENMSLDLGFDRKKNDIIEYYCGECILFKNLVPEFYHLRDMLFIFKSYMCPYIEKLPQVKVYKYDDINLKFEYKNKLIISVFNKKIDICGYMCPPKDTKFNFFSYIYQFIQTQENKKDNCILTYSNPNMYTTDIYIENELDVLYVNDLPYFHPSLDLRDVEILLQYLTVPYIRIPLILEFFCDKNRIKSFESFDIQQLILCILFEPYIFKNKYKNVEEDNFIPSKDRNIFATKYGLLINELIHSPKNVLCSVYSYLEIFFSFDNNNSINQKVIFIFIIIISSYVNSYIKLVLETNKEIRRNLNNIENIINKNKLIKKRKSYREKSYPHKDIIRPSEEEKEKKKRTISNYGNCDIKKDNNGINNNSEEHINGIHFDGNERTYYKYRKHIEKRERKRMFNFLNKLKRKLIKNDLYCSDDVLMNLEKYYKMIKKKLQNDVLGLLLKNIQMCIQKNDITTGSIFYGCILLIYRDIKFRELNKNNVKHILSSIFFILTYYNFSAETNYSDLKNIYGLGSLFVNNNDGTNNSNIVGETRYSLQKSTKLCTKENSYNETDSFSLLIKTFSLCECDLFISIHKYRNMLLKYLEKNELDRNIIFEHTIHICACVHDNTHNDNNNNNNNNNNNNNIGGSVKKNVYYNNRMNKHNANVFLNFRTNDNIIRKWLPVHKFKHVGIYTIEDIKNEKNKRKYLSNTNEYLEQEDNLGRHTKMTKNYYDNEYVKDNNYHDMNRNYYFTSSSSSSYDMDDDFSSSEEDSSSYNDEISLSFCEDNMNEDINEDEKKKKMTGKEEQIIVQYERNNMDNMSYDIMRMEKNEKKKKYKNYNKYSKGMKLKKKLKYDNYIDNNNNNNNNNNSDMKKINPLHDTESINSNVMNNYLSLPSFFKNSYYNKDDNNISYNNKVKRRKNLITRKDSILSNNKYISYIKNIIKEKNILINLQLFTFSYKDNNIITLNDNITKFKNYRDVFLNGSKNFMSIERRRRGYRMKRHMKVLITQSYQNFCSFNIIGKKHNLEVWRNSSRITYHNLMSYPFNKSKIFYLKSSSLLNNIKTVNNNNNLNNINNININNNAQNNDHNNNNTVGRDESLMITFNNFLLNEVKCGVLYEQENNDIYIKLIWKYNMNELERLTNENNIKSGNNKNTGEDNKLLENDMKDEEHRKMLKRKRKKELYDLKSFNINYETQNIEGLFNFKYEENQYDSSLINTTSESSYSNCSSYNSVSKRMLNNINDGDENKSDISSKSFSSSVLMMMMMNNKSSSNLSSSDDNIIISNNDNMNKDNIINNNDMNEGVYYNVDINSKEVDPIYKVNNESVQINYNNKKNEDYINIGNNNLMKKKKKKKYITDGKCDSLLYTNDDTFNEGNKKNIINIDLNKEKKKKKKKDSISKDIKKKHNYKNLMNLNIEEHGLREIIYRKDVDCIFIYNIFFHMNRFIKKLYYCSDIKKIYFSTSINRCKNLFYHFENNNVRLCYYNNSEGYEKYHVNISRNIYNNIQVQNYMSPNYLSTFVPSILLKNYNFWYNNNDNSLIGEIKHNKKNKKNKNFIIYIKLFNDKGENQYDTINSNKSVGNNNNNNINNNENNIYVNESEKRMNTIFNLMNNSGEKKRNIPIYPYGVIQKLNIFNSRKMNEQKITSLKVNEEYKALTLINILSVENNNVYKDFYNILNRFDHITYILMYTLNVPILFNDNTFTQDSNKNRYINDDEINCMNINVDIIEIPRLNLTLKRNNIDIKINTNEKKSIDYVDNYNEKSGLGRNKNTTNNSCMNNNINKKEGCKYYFEELNMFIYNGNIQKYNYIYNVIKKMNNTVLLQNHKNDFFFLVSLLNKPFFLNISTLYKEFNNKNIHLCTLLEKHINVLLKNYMYVSIYYHNFNINTTNGNKYFDLLNEDYNNNGNGRNGCSLQYIVLSIHSSKLFLNFRNLYSCFFFIVYKYLNKEHEEVIEYCNNLSICKEDINEINYLLNILNYCDYSIYSDVDSCACRLKIFLTLSKQIKIILQKKRYRINSKKKNSWDVNNYYNIFNYVKSLWNIEKNDDQDDSSNNELYNTNDYYINKRAYKDKYYMFDKNKGRSHSTMGHRNIYTSKNKMKNKHRNDKNYYDKDDTRNNVHTSDDSNNSSMYNTLSNISSSSDDNNVSSEKDIKRKELDAEEKINEDGDEEDDDHNDINNNNNNNNNNNSNNNNVDTLKISNKKKRKKLKTKLVGRSGDEKSKNRTKEHFNNNKKKKNNVNNNNVGGSKNFMGNQNVYYNDDNNMDSIIVYWDIFKDIVFYINNLLYIKAKCKLTIDEEIFLYQNCNINIHKHKLIYNRYIILNSIVESKLSSKNGNPLFFYNILKKKQIENQKKMRNYEICKNKKRNIFENLYNNKNEECKKSNIHDIDGKDSPMDNSNLGYGNNNYSSNMLYDNTNNSCFINKKENNISFLNKEEEEERKKKKEENKYKLLNLDSIKDNLLHMKEMIITNRIEQKHADLNNLVVSINVPKIETVKYINNIDENIFMNINLYDNIGNIINNISYKKLEDKNNVEALNYLNNLINTIGIHNFFVIYNFFINNLNIKIVKGENTFLYANLLSRFLYFYNYNISQYSKIIYIFIFIINHQEIISMLPKIDDQKLKKNYLNFFKTNDSLFNFFNDIFKFVQSYQTDKKKKIDKNIIPLKINNNINISVRDPMKYRLIININVDDYLCEKRIIRPFEIKNGFYVDSELLNELCFSPFKKLYKYLRKIRNNNQIDSVLHVGIDTKLNHDKKDIGTVDKEKKNIYMEKTCVNIETAFKNNDSNVMFDDNINKKKQEEMIIPTMHENNVKKISNMNEKMDNEDKKRNKILNFDFENSNFSCQNSYSKNFIRNMKNDYNKYLDYQKKKIDYEFIGFSVEEIKMTFNNIKKLKEYVNMFVCIKDILLEIFMGDNKLLECINEYIDDSMYINKDFIKKENDNNNNNNNNNNKNNNNYNSSSSSSNFYSFDKNNNLNDYSLSSDEDINLLANNYLYKFGILGKAEKEINLKILISCFMSKYAYEYLMLINPNLNRSHSEKYINIILLYMLIMNRKIFLHECINNVINILNIFKVYNLKLKILKQREKAYKSRTSLASTNSSILNNNNDSNNNSNNNSNIHMNSEHVNVLNKILNIQKKIINKAINTIKLGTKQLTQLTTTERHYFSLRNISNNKKVLYKNLEYNSDSSDVSSCYFSSDNNDLDDKENTMNIMEMNNGINHHNNYNNNSNNNNNNNNNCSNNQDEGNDKVNNSSCYYIKYGEKDFNVNYYYTYDPRLLIFEYTNNLIIRRKQVKMIKKLKRDFIKKKKQYCYQIIMGGGKTTVLSPLYFLIFSNYFLIFNMCPHPLIHFTMNSFRSRFSSIIKKNIFYFNFSRYNNITTDLYISLCSALENKYILVTSPTCIKSLFLKLISTIQELNSIKTFDMLKQKAKTHITDALTKFLGFQNEETKGINSGVSNTMSLAKTSINNNNYNNINNNNNNNITMGTQFSKNGSMSSIPSDYNMLKKQLDLCVRIFDILNKSILLIDEVDNVLHPLKSELHWPYGINRDIDLVNVVRNFTDIFMNNPYLKFLYNNKDDENVDIKNVKISITNEMKANDNLIYNIKHLKENEEREREQNKLLINYNTDHMLKNEYNMYNKMEDMIGRHKNSIDLGEKHIMMNNMNYSKYKSPLYNKKKEDLYNDHHDDNIINNKSTGCVVTSGDIVKALNNTEKDISFTHIDLSLFRYKLCWILIDFFFYPICKKLTVPMNVHFNINADYINDLLLVFNKEVDIGVKNHDISFIPHFHIINYKWYDNIVWILARYTYYFLLSYKFNGLSQKIVESYLCIPLCIGYNDIVSNKGRNNNGNMNYATMRRLLNIKKIHNKNYNMNINNVHMNNMNESDICFSNDYHLKIFEKINQLEFVFCKMLNLCRLYINGILPFVFTKINTVHYGILSVEQINKCKIIMSKSRYFLAVPYIGKDTPSSMSEYTNVDVVVALTILSYRYQGMRYVDFMLSLKNILYNYSLEKDNEHIQKDTSDDSSDTTLNNFITDESSSESSHSTKALSEDSTSRKRNISERRDNISQSLISKSIDNVNDSENTEESLNEENGQEDYSSNIESDASSSSSYYSSSDSRNDVSLINLGKSNDRVISSTCVKDMSIEEEAKINGDIQKEVKHDIFIHEENNKKKQNNNNNNNNNSKNNEKLNKRKKKKKKKKHINNKKNNEHTFKNDEKKYTNRRKRNLYGSNNDDNNKTNQRYVEIKSMYTLYKEIIESSGAKILKTKKYINNSNFFDYDNTVKRREEKKKSKLGNYVDNIDKINLNDSETLYNLYNLIKMNPLLISYFLLGIILEKYIKHTEKQLSSNSQDFTNNILFKYVLGYSGTSNDILPEEICKCKYEKRTIGSILNIINDTNIVNFIFLPSKFSPIQILKSLGYSKIKFNSLIDTGYLINNISPKKVAYYILQFLDYIDCCIYIDNGKHMCMLPMEKRRLKKRRRKIKRNKNGKNIQKMECDNEEMIINPDLLMKGYQSKNEQNETKTNIVKENDLYKKKVKKSKKSKKERKSKKWNSKIEDNLNFSVEIIPLQDCYVPIKRRFIYFDHINTFGQDIKQYINANSLVTVNIGNDISSFSQGVFRLRSIGMNQKIFFLIPLCLVKLMNINTNLFNELIYSSFMKKHDTNDDKNNNNSSNNNNNNKTSVMGKRNKINIMKKFQRSKKVIIKMCNKNYSDDSKSGSDSDPILFSSTDSSDSNNSNNSNNSSNSSYDNNNNMENYMKDVELFSTYINNNNEKYILNNDYIDEENMLYMMDCYNSIFLDNEVKENVLKELTHFLILNNINNNVKQCELLCVHGIVNLIKKKSIKTLIDNYINIGVISYKEYLDIFNTSIDFDIQTQVPSKNNSLLCMVQLIEKFHKIFTAQDELYIQDIIYKYFCLHYDFSNKTIYMYFDAFFPKKYFLKMNVSQVILDLFNKLKKIKKDNLILNKKKILMKTSDNNCGIYNNYNNDDDDDNNSNIDNHLFSMENEQEKEKEKEKEKEKEKEKEKEKEKEKEKEEEKIVDDPKKKNIKYKKDEYKLYHWTVDDINIDLYGMPNKDHINNKSTKNFMNNKINETFKKLRDDGPLFIPLNKMCVNDIYLNFPSYIYVSKNFINNENINTKRVKKLKNVLVVIECVYNNTKGYDINMDDKNTINNVSNMDNMNSMNNTCSINYMNNNNCSINYMNNNYDVYGERDILKNIWNILNESDNIEEMLNILDINAFKYSYDLSNVIRNYLDKNRNVNNNSFINFTNILNELELYFCNGNKKYIIVSLQEAETLRYHVHKRSNIQKIYEAFFRSTVHVNNKEQIKCMYNDKEEDQNVDQYVDQNVDQYVDQYVDQNVDQYVDQYVDQKNHEHFKTSKLCVQDNINNNYKEKENMNIFDIIEEKNNNKKNHISNNNVVDVDIGKNISNDIDTYIKDNMNDDNLLNDPWGLQENIPNINLIGDKSNDSIDNFFSGNMDKINNKNIVEHNNIDKIDNKIEKKENTYNKNILDIMNIKDCGQNMLIACNNININIYNYNFWFTPIEISDKNNLRKYLSRQIQIVYSVCKFFNSDRKFIDAHVNLLLQYLNFNPPKHRFNYFNELYLIRRLMKENQNSGLKNIEKNFYAPKKLQLEILEKKLFEGNGDIYAFKVIQERVRQSLKGKNLTLQKIFEKDLNYICTMEDIRIVFDYLNIRDKNCINILFDVLGRNITLHELCLFLNPVENRRDKKYNRLEKNKRMNGNMLQNDMNYINNNILQTQNIGIQNKGNNNNNNNNYIDHQHNNLIRDIEKHLKNFRFSLTEHTHMKLVWSGKIAHQRIHHDMTHENNKNEMCSMNNINPSSYNFAKNESHHNNMNNNKNSFSNNNNNNNNQYDYVKKSSTNDLISDIFYTFQNKTHNRDEINLLSNTNQQNNINKMSYNEDMFYIYEAENVDPKDRGIMSKNKHKIVCGHYASNKMYDINNNNNNINNNCSNNIYNSINAFPIIEMTDITINSMYTSTSGNDMLNLLFPYPKKYLLLWHEDYSLKNVNECLHIWKPILSSSAHFSNNIFVGHVATVGPQSPPLNKIRAIPKVLVKNVQSKKYSTFFADNSFAIDNSGVFRTLNIHFFNGLEFKNYEEFSFRNFSLSIISKMKKIKSVNEDIFNLWGDENNEIEQDEDDESSSEWEIIAQPF

SEQ ID NO: 59 - DNA, 13791 bp, Plasmodium falciparum
atgggtaattgcaagtcctattcttctcactttagtgttaataaaaataatactaatgaattatatgaaaacttaatatgtaattttattgaaaaggataaacttttgttttgcccaaaagcttttgttatatatgaaggtaaatgtaaataaatatgtataagaccatgtctattttgtgtatgtaaaagtgttttcttattattatattatattatatatatatttatatatatttatttattcatttatttatttttttttttagttttaaaaagaaaactcgaaaataaagatgagtttaagtattatattgtgaggactctccagaggaagaaagtgaagaatgctttaattggtttaagtgaagattacaatatcgatgttttgaattttttattaaagttatttaaaaagataaacaatgattattataacaacatattgaacttccaacatagtaattattataattattttgttcgtgaagatacaaaatttgtaagtttctcggaacaaataaatatcattcttaacatatataattttgtacgtatgaaatatatactggaaaacatttgcttacatttatattttgaagtacatgatgatactaaggaaaattatgaatatacagaaaaaaaaaatgggagtaataaaaagatgagtacagtaaaggtagtaaaagaaagatcgaatagtttattacattttaagaaaaagaatataagtaatacattaagagatagaaagaatatgatatatttaataaaaaatcgttttaaaaaaattgagagtttttgtaaaaataatttacattgtaatgtatttgagaattttaaaatatgtaatatgctgtgtttatatattttaaaaaataattataaaatgaaatgtattttatataatatatttagtgttatgttttttataaataattattttaatatatataataagggacaaattactaatcatataaagaaattattttttaatgaagacaaatcacaaataaaaaatgagtttttaacaaaatccaataatgaagaaattaaatattcctcatgtttacaagatatttataaaagttatttatttatttctttatgtcttagttctgatgaacagattaaagaacatatattatataatacaattattaatataaatcaaagtccattacgattctctaaatgtattagtgaattcttaaatatgtataatacttcaccaaaaaaaatgcatactcttttttcatcaaacgaaatgatggataaaaaagaaaaaaaaaaaaaaaaaaaaaaaatttacgaatgttcacataaaaccatacagaattcttatattaatgataattttataaattcacattatatttgtcaaaataaatatataaaaagtattttaaatataggtaattcaaattatcacataaaaaataatatgatgatattttgttttgtcttattcgaaaattcaacttatatgcaaactagctacagaataattaatacaataatcgagcaagaaaaggaaaaggaaaaggaaaaggaaaaagaaaaagaacaaaaggaaaaaaaaaaaaaaaaaaaaaaaaaaaaaaaaaaggaactcttatataataacagtaaatctagtgatcaaatgaatacaccattgactaagaagaaaaaaaataaacagaatgagaagaaattcaaatttaatctgaaattttataaaaagaatgtgagaaaagaaaataatagtagtacacataacgaacatgaagaaaatgtacaaaatacatatgaattaaaaaaaagctattcatataattcagattgtaaaaaagtggataatatttcctttgatttaaatagtataggtttttttagaattgatttgtataatcttatgcaagaaaattttgaatacaatatagatgataatatagataactacgtaaagttatataccataaaaaaaaaaaaaattaacaatatagaagatgaaaataataaaagaggaagcagtaaatacatttatgtgaagaaaaaaattaaaaccaaaaaagattatgaactaattgaaactatgaaagataattttatacatgttgttaatgttttaaaaaccatgagaaacaaagaaatatgttatatatcatcagcaaatacttttgaagaatcatatgataaaaataaaaatgagtacaaaacaaatgtaagttacacacaaatagaaagtattgattattcatttaaatccaaaagtagtgataaaacatttaaaaaacaaactgatatgaattgttcagaaaagaatgaacatatttcatctgataaaaatgtaaatgatgaacacaatgataatgaaataaataccatatgggatgagaagggtgtgggaaaaaatataaaaaataatgaaaaaattaatgcaggaaataatttaataaaaccatttttcataggggtacatgacatatttgttccttttgatatggaaaaacttattcttcataaatcacatgatacatttgaatttaaggataaagaaataattagaacaaagactacaccattatatcgaaaaatacctaatcattccagaacacatccaagaaaaggtgatacccatgcattaaataagaatgaaagaaaaaagaaatatatagtatcaaagggaacaaaaaacaaatttcattacaagggaagttatacagaaaatgaaagtttttataaaagtgttaatataagaacaaataaaagtacggaacttgatcaaaaagatgattcgtttaatgttttttatagaaatggagaaagtgaattattgtttagtaaagatagcttaaattttgataatatttatgagaatccgaccttaatgaatatatttgaagaaatgaaatatagagaacaaacagaagaattattaaaactatataattttactactaaaaaaaaaaacatgaacgaatttttaaataaagtaaaaatgtatggtaagacaatatgtattagggatgcacctgcagaaaataatgatgatatatatactgattataattattataataattataattgttatgataacgatgaatatgataatgatgatgttagtaacaataatcgttatgaatatgaaaaacatttagcactttataatagaaataaaatgaacaatattcccgagaatgaaaatatgaagaaaataaattcaaaaagtaaaggaaagtcacaacataataaagaaaaaaattctattgatgatgaaatagatattgaaaattatgaagaagaaatagaacaaaataatgatgatgatctaaataatattaataatgatgaagatgatgaacaaataaatcaaaatttttttaatgattctttaaaaatatttatacaacacaaaccaattggtgaaatgtgtaattttgttaatatgaaatatatacatatttcttttaatatgtataaagtatatgaagggaaaaaaaaactaatacttagtacatatacgaataatgaaaaaagtgattcattacaaaaagatgatggaaagggaaatgtaaaatataaagatattgaaaagggaaatgtaaaatataaagatattgaaaagggaaatgtaaaatataaagatattgaaaagggaaatgtaaaatataaagatattgaaaagggaaaagtaaaatataaagatattgaaaatgtaaatgtaaaagataatgataaagaggatggaactaaatgtgtagggaaaatagaatataatattaccttagataaaaatgaaaattttaaatatataatagacttaatatttttgcatttaaattataatagatgttattatatatatatacccaaaagattgctagttaattttatgaataaaggtggaattccagaagataatatatttcttaattctatgaattgtaattgtgatataattttagaaaatttatatattattgatcctaatgattgtattccgaataataatttaacaaatatacatattcctttatattttgaaaaaattcattttgttgaaattgttttatttcttttatgtgatgtattaaaaatatataataaaataaaaaaactaaaaaaacattttgaaaagaaatgtatagaatttacaaaattattttatgattattttgatactcaattgaaaaaggtaaattatgaatactgtaaagaaaaaaaaaataatatattatcacttcctaatgaacttttaaaaaaaagaggttccaaaaaattagaacattatactatgttaagtagtggtattaacatttcttcattaaggcatatttcaaattttagtgaggaaaaatatattagtactaaagaagataataataattattataataataatatggatattaaatcattaataattaatgtttcatctacattaaattcagaaaattgtacaaataatgttaacaaccaaatgaataatatgaatcaagaaaatgatgaagatgattctaaaaataagaaaaaaacaaacaacaacaagaacaacaataataataataataataatgataatattatctttaataataattttagcacatataaatctaatagtgaaaatcctttcgatattggatataaatataataatatttatataaaaataatagacgtaaaattatatgattttattatagattatctaaattatataaaagaaaataatagttgttattatttatgcccatatatatttgtttataaatttaaaggactttgcttcctttttgttcctgtatgtaacaacttttatttacttttttatcatttcttttttcatttccttaattgttcagatttttttagtttcaaaaaatgttttaatcgaaatattaataatcatgatgatgtttcaaaaatacattgtgctgtacccacgaatcataattttatatatattaataatatgattaaaatattaaatatacataagaataataaaatgtatgtgaaatatatttcattaaacaaacaaatgcaaaataaagaaactgtgtattattataaatggattaaaagcaaaattgttattgatattagaaactctttttcatctccttattttattcgtacgaagaattttattagtttcattgaaaatacaaatttaaatatatgtctaaggaaattatatttaaataaagattgtgccttttctgtaaaacttgataaaaagaataagaataatgaaaattcatcggcttttaatgatatcatatgcttgtttaatcagtactttaatatgtttacttatttctatgatgagaaaaaaatgagtagaaataatgaattatttcgtcacaatagatatataattatcccgtattttaatgatatttatattaatcgaaataacttgcttatatattggaaaatgttagaagatttaaaaaatgttaaaacggagaataagcttaatgattctaataataaaaatgacaataataattataataatagtaatcaaaatattaattgtaataaatcaaataacagtaatgataaatgtttgaaagaatctgaaaaaaatgaatatgacaataaatatggaatgaacgaaaatataaaggatgataactaccactataataagaatgataatgaaacgaaaaatcttaaatatttttttatttataatatatatgaaatccatagagatatcttcataaattatttttatttgttattaaacaaaataatagtagaagctgtaaaagaattgaaattaaataattttttaagtattcataatttattacaattattaaataattatgaaataaatttcaatatgtttttttgggtattatatgataattatataaatatttacaaaaaatatagtgtccatgcagaacttgtaaatttttttaataataataatccaaataaaagttacgttctcgattcttttaaaaaacaaaaatttaattattgtaataaaaagaagttttatgtaagacgaattttagtattttgcacatgtatattattatctattatatgtagaaatatatgtgaattttttataacagaattaaattattcttatgaaaatgtattcagtgtaatatgttactttttcttttctaataagaagtttcctcagataaatgatgatataaatttgaattttttaaagtcaatttattttaatttatttgtatccttaagctttgttttgcaatatatcccattaaatgtccaatatttaaatttgtttaaacttataaagaaagtaagaaaatataaatttattctagctatgtgtttaaatcatatatgtggtatgaatatacctttctaccttttttgtgaactttataagttacccttacctatgttaaataatttcttttcttttaataaaaaaatgtggaatccttgttctaataatttcgaattatcaaattcaataactctgaacgaattagaagaaaattattatgatgaaattgattttaaaatggatgagaaagaaagtattcaatggataaacgacaattttgattttaatatatcaaatgattccttacgtctttttaaaaataaaaaaataaatagacaaatatataaatgttttcattataaaacagaacacaataaatataagaattttataaaccttgtgattaaattgaattttaattcatatccaaatttatatacatttcataatattgaacaggcttcagataatatattaacttattctacatataacaatctttttaatttcaaacaaaatcattataataataataataataataataatcatagtaatcataaaaataatgatacgaatgctgattttttcataattattttttcacattttcttaatttcatataccaattttggaataaaagaatttgtgaagtaagtgagtatcagacattgcgtagtacaagctattcaagtcaagatatagaatattcgaataaaatagaaaaaaacaacaaattaaataatataaatataattatgcagaatacattagattattgtgaaaaaacaaatgaatatttaagagaatcaagtatactattagaatattataatatttttaaagcaagtacttgtttacaattatcgaatcaaccaaatataatggaaaatggtatttttgattgtctcttatatatcatagaagtgcactatcctcatttattaattattcttccaatttttttgaaagaaaattttaatctcttaacatatgatataaaagtttatttaataaacatatttttctttatttttattaaaacagataaatataaaatatataaacaaaataataaaaaaaagaaacatccagaaggtatatataataaaattatgaatagtacaaattttgtagaaaatactaacaatgtcatattacaaggtgataaaaagagttctgatgaagtgttaaaacattcatcattttcgaaggatatttttatgaacccatatgattatgcaagcagaagaaatttcttcgaaatgaaatctgaaacgaataatgaaatgtataacaaaatgaatactggatcgtataacaaaatgaatatagaatcgtataacaaaatgaatattggatcatataacaaaatgaatattgaatcgtataacaaaatgaatattgaatcgtataacaaaatgaatatttctccatgtaacaaattcaattatgaaacatctgacgatttagaatatgaaacagaaaacaaaacagatatacatactagtatagaatccgaaagtgcaactgaaagtgatatggagattatatatgaaaataatacaaattggaataatattcataaagacaaactaagaataattttattaaataatgattataatatgtatttaatggaatttttttttaaaattgttttacgaatagttccatttttcaaggtaaagaataaaaagaagcctgtaaatatgatgaaatcatctataatatacaacatcgcaataatattaaacatgttaaaatcatttaagaatattatattatcaaccaaaaataatttctttgtatttatatattatttttttataaaagggtatatatcattagttttggtgaatataaacagagccctaaaatactttaaaaaagtatttcttcttcttttatttttttttggcaatccaatgtgttccttaaactctcatccatttttggtatatgttacatatattttatattgtttaactgtattatccaaattaaatatgggaaaattttatgaaagtgttcaaaaaaggggaataaagttgtttaagaataataattatgataaagaccaacaattatgtacagaaaataatgataataacaataataataacaacaataacaatgataacaataataacaataataataataacaataataacaataataataataagatttattgtaaaaatgaaaatattgaaaatgaagcttataacatgaagaataaaacatataatatcgaacctaaaaaatatatgatggacaataaaatgcgtaataatatcaattatgaggataaggaaaatgatagtttatttagtgaagacgatatcacatccataaataatatatggctaaaacagaaatatgaaatatggatgcttttagaaatacttcgttcaattaaaaataattatataaaatttaacaataatatatatttagtacctttgaattatttgtttataaatataaaaaaacttttgaaacaatgcatacaagaaaagaaaaagattaagacaactgataatgtaaataaccattataataaagaaaagcattttagaaagaatagtaacggaatggattttataaagaaagatgaaaatgttgttaattcatttttaatgaatactgttaatttaaaagataaaataccagatgaaaacttattaataaatataaataacagttatttagcattatatcctacaactgaaaatgtaaatgttccagaagttcatataaatgaagacattgataaatcatttttatattattctgaacgggaaaaagaacaaatagaaactaatactttttataataataaagagtatacagaaatgaaagattccaatcttgtagatattggaaatactataattaaggaaaatgaacaagtcaaagaagaattatataaaaaaagcaaacctggagaagaatgtgaagatgaaaacgaacatgaaataaatgaaatggaacaagaaaataatacgtattttttaaattcccgaatgtcaacaaataatttttataatgaagaaaataaacatagaaaaattaaaaataataaaacaatgcattatggatacattgataaaaaagacatttgtaacatattattatataacttaatatttattaataaaatgaacaaaaaattaaataattgcaacaatattggttattaccattttaaatattgcaactttaaaaaaattgttataaattataataaatattataaaatgatattggaagcgtttaagagtaaattaagtaaaaattattatgcctacacatttggaaataatgaaaatggaactctggctattgggaaaccttcttatctaaagttatctccaactattggttcacttggatatgataaaaataaaaagagtataaaacaaggtaacgatttttggtttacgaataatttgcaactacttccaattaagattaaaaaaatatgtatgaatgaaggcatgatttcattaattgataaaaaacataatttatatattggtggtaataatacatttcttggatcaaaaagtgaattgtattttaaaagggtaaaatcaaaagataattatttaggaggaaatgtacattgtacatcaaaaaaaacacatgacaaaataaaaatagataaattctttatgaatttaaaattaaaaaaaattaaaaaagaggaaaaggaataccttgattacaatagttcatctggtgatagtgataatgtcctatttgaaaaatcgttatcatataatggaactacaaaatttttaaaacgtttaatttttcaaaatgataatttttctgaatttgatagaaacaatgacgatacaatatataaaaaagcatgtgcaaatactatgggtgtatccataaatatgatatatgataattttagttcttgtgaaagtgacatacattcatctattgatagtgatgacagtgatgctacatatattaaagttagtgatatagaagaaataaataaaaatttaagtattaatattttattaaataatgatgaacataaatctttctatgtacaaaaaaaaagttattctctaaaaaaggtgtctatagatgatattaatatatataacagcatattatactattcatcatatgataatcagtatttaacacatattcttccaaactacatttcttccgtaaaaattatgaacaaatattgtaaaaaactttcgtatgattattataaagaaaaaaacaatgcaaacttaaaatatcaagaaaaaaatatacacggagaaaaaaagaataatgatgaatatgaaaattcacaaagatatttagaagaatctgagtatggaaaaactagtaaaggttattataagaatagtagcacgatgtcatcaggaggaaaagttgataaactgttaatggaaaataatgtaaataattttaagtttatttataattttatacatgatattaaaaatagaataaaatttattgatatttataacggttcagattttattatatcaataaacaattttggtcatgtatatgcatggggaaataataaatatggatgtttaggaactggtgataccattaatagatatgtgcctacattaattgatccaggttatttctttttatatgattttgaaaagttacaaatacatacaagttacaaaactgaaatatcaataaaaggtatcgaaaaaacaaatagtatgtgtaatgaaaatatattgtataattctttattacaagaagcaattaaaaaaaatatttataataaaaatataaaagttcaaaataatataaaagaatcctttattaaatgtaatgaggcggattgtaaatctgttaattcaaataatttcgtaattccaaataaacattttaaagatgatgttttagcgacattaaaaacagataatatttatacatcagaacacatgctcaattttgaaaacataaatgttgacaatgtaacgataagtgtacaaaaaatttacgttcccattaattccattttttgtggtaataatcatgtttgtgcatattcaaatggttccatatttatgtggggtgaacaaaaattaggtcaaacatccacaccctttgaaaatatatactttgatattcataataaattaccaaaatcagatagtgattcagatactaattataaaataaaaaaaaatgaaaaaagagaaagtagaaagaataaaacaaatgatttcttatcttcaagttcttcggaagaatattaccttaatttgttagacaggaaaaaacttgaaagtatgaaaaatagatataacaaaaataaaattttattttgtaagaaaaaaattagtttcagtgtaaaaaacccaatgcaaaattattataacataactaatgacgaaatattccttaataacagaaaattaaaattgtcttctaatttaaatgcaacaaataaaattaaaaagaaaaaagttaacaacaatttagttcttatacccattcaagtttgtgtatttaatttatcctatagagtaaaaaaaaaaataacaaataatacaaatgacaaatatgttaataataaatccaatgaaaatgaagaaaaatatgaaaaagaaacgttaataaattcaaattatgattttaatagtgttccaacgagtcaaaataatgatcgccacattaagaatgagaatataaataaaaattgtggggaaaaaaacgtaggagcacaaaatgcgaaattaaaaaattctagtagtagtaatactactattactactactactactaataataataataatagtgattatacaagagtttatgattatcttgaatcgtttataaaaggtgaaatagtaaatatgtatatgaacatttttagaaatgatataaatatatatacaaatattcctaataatattaatataaatccatacatatacggaatgaatttttacgattacaatttttataatgagaaatataagaactttcaaaattatttaggacaggaaataaatgaaaatgaatataatgccaataataatactcataagaattcatatttttcttcaaatgaaaattataataaatataaagatgacatttttaataaaaaaatgaacgatgaaaaatatactaataaaaatgaagatgaatatactaaatcatccaaaaaaattgatctacttaatattgaagatccaaataagtttgtaaaactaatgaaagaaaatgaaatgattaacccacaaatatatgaatacattgataaggaagaaactgtatgtattaacattaaattaattattttcttatttttatttataaagaaaaagtacatgactattttcttgaacagtattcaaatggtggcaaatgtttcgtgtggtgaggctaataccgtaataacatgcttcaaaaaaagtatttatgataaatattacaaatatataataaaaaatattacttgtttagaaaattataaacatttagaaagtacgaaattgaagtcaaaattaaatttaacgtatccagaatattattttagttcaacgagtgaagacagtgaacatttttatagaaacgatatatatgatgttaaaaattatacaacttcaattgtaaattggggtgacaaatcatttgatgaatacaaaatcataaattctgcatattctcgttccgatacatcacgcatttatcatatgatagatgaaatattagaaaattatatgtgtatttatgtatgtggtagggatacaaataataatttatgtgtcaataatattaatcaaagtatatacacgtttaccagaataagtaataattttttttattacaactttaacaatttcctatatttatataaatataattattatttgtactatatacataaaaataaagttcatattaatcataacaatgatgtatcatacattcaaaacaaccctcttaccttatttaagaataaatttaacataataaataataaagatgataatatgaatctgaatctgaatcaatctaattcaaaatgtcaaggtgtttcaccaaaacaatttataataataaaaaaaattgtttgcagtaatattgttacatgcttaattgatatatataataatgtttatattgctggtgacataaaatattattttccaaatcattttcatcacattgcatatgcatcttcaccttttgttaaaatcaatttgaataacaacaaaacaataaaaaatgtatcaattagtcaaaataacatatttttagtatatgatgacaatagtttggaaatattaggttataatgattatattgatttctttgaatataatcatcctatattttttactaacaaacataatcataaacattcatataatattgtgaatattaaaaaatcagatttcttggtaaaacaagtaagtagttcaaaagttatacaaatttatataatatttttataa

SEQ ID NO: 60 - protein, 4553 aa, Plasmodium falciparum
MGNCKSYSSHFSVNKNNTNELYENLICNFIEKDKLLFCPKAFVIYEVLKRKLENKDEFKYYIVRTLQRKKVKNALIGLSEDYNIDVLNFLLKLFKKINNDYYNNILNFQHSNYYNYFVREDTKFVSFSEQINIILNIYNFVRMKYILENICLHLYFEVHDDTKENYEYTEKKNGSNKKMSTVKVVKERSNSLLHFKKKNISNTLRDRKNMIYLIKNRFKKIESFCKNNLHCNVFENFKICNMLCLYILKNNYKMKCILYNIFSVMFFINNYFNIYNKGQITNHIKKLFFNEDKSQIKNEFLTKSNNEEIKYSSCLQDIYKSYLFISLCLSSDEQIKEHILYNTIININQSPLRFSKCISEFLNMYNTSPKKMHTLFSSNEMMDKKEKKKKKKKIYECSHKTIQNSYINDNFINSHYICQNKYIKSILNIGNSNYHIKNNMMIFCFVLFENSTYMQTSYRIINTIIEQEKEKEKEKEKEKEQKEKKKKKKKKKKKELLYNNSKSSDQMNTPLTKKKKNKQNEKKFKFNLKFYKKNVRKENNSSTHNEHEENVQNTYELKKSYSYNSDCKKVDNISFDLNSIGFFRIDLYNLMQENFEYNIDDNIDNYVKLYTIKKKKINNIEDENNKRGSSKYIYVKKKIKTKKDYELIETMKDNFIHVVNVLKTMRNKEICYISSANTFEESYDKNKNEYKTNVSYTQIESIDYSFKSKSSDKTFKKQTDMNCSEKNEHISSDKNVNDEHNDNEINTIWDEKGVGKNIKNNEKINAGNNLIKPFFIGVHDIFVPFDMEKLILHKSHDTFEFKDKEIIRTKTTPLYRKIPNHSRTHPRKGDTHALNKNERKKKYIVSKGTKNKFHYKGSYTENESFYKSVNIRTNKSTELDQKDDSFNVFYRNGESELLFSKDSLNFDNIYENPTLMNIFEEMKYREQTEELLKLYNFTTKKKNMNEFLNKVKMYGKTICIRDAPAENNDDIYTDYNYYNNYNCYDNDEYDNDDVSNNNRYEYEKHLALYNRNKMNNIPENENMKKINSKSKGKSQHNKEKNSIDDEIDIENYEEEIEQNNDDDLNNINNDEDDEQINQNFFNDSLKIFIQHKPIGEMCNFVNMKYIHISFNMYKVYEGKKKLILSTYTNNEKSDSLQKDDGKGNVKYKDIEKGNVKYKDIEKGNVKYKDIEKGNVKYKDIEKGKVKYKDIENVNVKDNDKEDGTKCVGKIEYNITLDKNENFKYIIDLIFLHLNYNRCYYIYIPKRLLVNFMNKGGIPEDNIFLNSMNCNCDIILENLYIIDPNDCIPNNNLTNIHIPLYFEKIHFVEIVLFLLCDVLKIYNKIKKLKKHFEKKCIEFTKLFYDYFDTQLKKVNYEYCKEKKNNILSLPNELLKKRGSKKLEHYTMLSSGINISSLRHISNFSEEKYISTKEDNNNYYNNNMDIKSLIINVSSTLNSENCTNNVNNQMNNMNQENDEDDSKNKKKTNNNKNNNNNNNNNDNIIFNNNFSTYKSNSENPFDIGYKYNNIYIKIIDVKLYDFIIDYLNYIKENNSCYYLCPYIFVYKFKGLCFLFVPVCNNFYLLFYHFFFHFLNCSDFFSFKKCFNRNINNHDDVSKIHCAVPTNHNFIYINNMIKILNIHKNNKMYVKYISLNKQMQNKETVYYYKWIKSKIVIDIRNSFSSPYFIRTKNFISFIENTNLNICLRKLYLNKDCAFSVKLDKKNKNNENSSAFNDIICLFNQYFNMFTYFYDEKKMSRNNELFRHNRYIIIPYFNDIYINRNNLLIYWKMLEDLKNVKTENKLNDSNNKNDNNNYNNSNQNINCNKSNNSNDKCLKESEKNEYDNKYGMNENIKDDNYHYNKNDNETKNLKYFFIYNIYEIHRDIFINYFYLLLNKIIVEAVKELKLNNFLSIHNLLQLLNNYEINFNMFFWVLYDNYINIYKKYSVHAELVNFFNNNNPNKSYVLDSFKKQKFNYCNKKKFYVRRILVFCTCILLSIICRNICEFFITELNYSYENVFSVICYFFFSNKKFPQINDDINLNFLKSIYFNLFVSLSFVLQYIPLNVQYLNLFKLIKKVRKYKFILAMCLNHICGMNIPFYLFCELYKLPLPMLNNFFSFNKKMWNPCSNNFELSNSITLNELEENYYDEIDFKMDEKESIQWINDNFDFNISNDSLRLFKNKKINRQIYKCFHYKTEHNKYKNFINLVIKLNFNSYPNLYTFHNIEQASDNILTYSTYNNLFNFKQNHYNNNNNNNNHSNHKNNDTNADFFIIIFSHFLNFIYQFWNKRICEVSEYQTLRSTSYSSQDIEYSNKIEKNNKLNNINIIMQNTLDYCEKTNEYLRESSILLEYYNIFKASTCLQLSNQPNIMENGIFDCLLYIIEVHYPHLLIILPIFLKENFNLLTYDIKVYLINIFFFIFIKTDKYKIYKQNNKKKKHPEGIYNKIMNSTNFVENTNNVILQGDKKSSDEVLKHSSFSKDIFMNPYDYASRRNFFEMKSETNNEMYNKMNTGSYNKMNIESYNKMNIGSYNKMNIESYNKMNIESYNKMNISPCNKFNYETSDDLEYETENKTDIHTSIESESATESDMEIIYENNTNWNNIHKDKLRIILLNNDYNMYLMEFFFKIVLRIVPFFKVKNKKKPVNMMKSSIIYNIAIILNMLKSFKNIILSTKNNFFVFIYYFFIKGYISLVLVNINRALKYFKKVFLLLLFFFGNPMCSLNSHPFLVYVTYILYCLTVLSKLNMGKFYESVQKRGIKLFKNNNYDKDQQLCTENNDNNNNNNNNNNDNNNNNNNNNNNNNNNNKIYCKNENIENEAYNMKNKTYNIEPKKYMMDNKMRNNINYEDKENDSLFSEDDITSINNIWLKQKYEIWMLLEILRSIKNNYIKFNNNIYLVPLNYLFINIKKLLKQCIQEKKKIKTTDNVNNHYNKEKHFRKNSNGMDFIKKDENVVNSFLMNTVNLKDKIPDENLLININNSYLALYPTTENVNVPEVHINEDIDKSFLYYSEREKEQIETNTFYNNKEYTEMKDSNLVDIGNTIIKENEQVKEELYKKSKPGEECEDENEHEINEMEQENNTYFLNSRMSTNNFYNEENKHRKIKNNKTMHYGYIDKKDICNILLYNLIFINKMNKKLNNCNNIGYYHFKYCNFKKIVINYNKYYKMILEAFKSKLSKNYYAYTFGNNENGTLAIGKPSYLKLSPTIGSLGYDKNKKSIKQGNDFWFTNNLQLLPIKIKKICMNEGMISLIDKKHNLYIGGNNTFLGSKSELYFKRVKSKDNYLGGNVHCTSKKTHDKIKIDKFFMNLKLKKIKKEEKEYLDYNSSSGDSDNVLFEKSLSYNGTTKFLKRLIFQNDNFSEFDRNNDDTIYKKACANTMGVSINMIYDNFSSCESDIHSSIDSDDSDATYIKVSDIEEINKNLSINILLNNDEHKSFYVQKKSYSLKKVSIDDINIYNSILYYSSYDNQYLTHILPNYISSVKIMNKYCKKLSYDYYKEKNNANLKYQEKNIHGEKKNNDEYENSQRYLEESEYGKTSKGYYKNSSTMSSGGKVDKLLMENNVNNFKFIYNFIHDIKNRIKFIDIYNGSDFIISINNFGHVYAWGNNKYGCLGTGDTINRYVPTLIDPGYFFLYDFEKLQIHTSYKTEISIKGIEKTNSMCNENILYNSLLQEAIKKNIYNKNIKVQNNIKESFIKCNEADCKSVNSNNFVIPNKHFKDDVLATLKTDNIYTSEHMLNFENINVDNVTISVQKIYVPINSIFCGNNHVCAYSNGSIFMWGEQKLGQTSTPFENIYFDIHNKLPKSDSDSDTNYKIKKNEKRESRKNKTNDFLSSSSSEEYYLNLLDRKKLESMKNRYNKNKILFCKKKISFSVKNPMQNYYNITNDEIFLNNRKLKLSSNLNATNKIKKKKVNNNLVLIPIQVCVFNLSYRVKKKITNNTNDKYVNNKSNENEEKYEKETLINSNYDFNSVPTSQNNDRHIKNENINKNCGEKNVGAQNAKLKNSSSSNTTITTTTTNNNNNSDYTRVYDYLESFIKGEIVNMYMNIFRNDINIYTNIPNNININPYIYGMNFYDYNFYNEKYKNFQNYLGQEINENEYNANNNTHKNSYFSSNENYNKYKDDIFNKKMNDEKYTNKNEDEYTKSSKKIDLLNIEDPNKFVKLMKENEMINPQIYEYIDKEETVCINIKLIIFLFLFIKKKYMTIFLNSIQMVANVSCGEANTVITCFKKSIYDKYYKYIIKNITCLENYKHLESTKLKSKLNLTYPEYYFSSTSEDSEHFYRNDIYDVKNYTTSIVNWGDKSFDEYKIINSAYSRSDTSRIYHMIDEILENYMCIYVCGRDTNNNLCVNNINQSIYTFTRISNNFFYYNFNNFLYLYKYNYYLYYIHKNKVHINHNNDVSYIQNNPLTLFKNKFNIINNKDDNMNLNLNQSNSKCQGVSPKQFIIIKKIVCSNIVTCLIDIYNNVYIAGDIKYYFPNHFHHIAYASSPFVKINLNNNKTIKNVSISQNNIFLVYDDNSLEILGYNDYIDFFEYNHPIFFTNKHNHKHSYNIVNIKKSDFLVKQVSSSKVIQIYIIFL

SEQ ID NO: 61 - DNA, 1887 bp, Plasmodium falciparum
atgaataagaacaacaataaaggtagtgttaaaaaaaacaataattccaagaaaaaaacaagcacaaatataaacaatgtgaacaatttaagtagtataaaaaatataaagaatgaacagaatgtgaaaaacggagatgtaaatgatgaaattgctactactactagtagtaaccatgttaatatggtgttgaatggaaatgatgaagggataaaagatgttaaagttgttaataatttaaatattgataacaaaagagaagataataatgttagaataaatgtacaaggagaagaaactcttaataatgatagtaaaaataaagaggctgaaaataaaagcaatataaagaataataaatcgaaccagtccaaccaatcgaacaagaagacgaagaacaacaacaacaacaaaaataataataataacaataataacaataataataataataataataataataaaaatagtacatcaaataaaaaaaactccaagaacaagaaaaaagttgataaattagacttaatattaaatgaatttaaaaatgatataaaaaatgaaaagggagaaaacaaccaaaacgacaataagttattaaacggcgctatagaaacaaataacaacaataataataataataataatagtggtaataatagaatccattttgataaagaagaaattaaagaaattaaaaagaagataatattaaaagaacatgtgttagaagaacaagataatagctctattcgattgttaaagaattggcctcaactagaaaaaacatatcagacgaatcccccatgtatccctatagatatgatatatggaaaagatgggaaatatccagttggggaaattttagaatataataattataatttaagtggacaatctttagtcgaaaaaaaagaaagagaaaaattaagtattgattattatgaagatttaagaaaagctgctgaatgtcatagacaagttcgaaaacacatgcaagcttttataaaacctggaaagaaaatgattgatatagcacaagaaacagaaaggaaaacaaaagaattaatacttgctgaaaaattaaaatgtggttggggatttcctactggatgttctttaaatcattgtgctgcacactatacaccaaattatggagatgaaactgttttaaagtatgatgatgtttgtaaattagattttggtgttcatgtgaatggttatataattgattgtgcttttacaatagcatttaatgaaaaatatgataatttaataaaagcaacacaagatggtacaaatacaggaattaaagaagctggtatagatgctagaatgtgtgatattggagaagccattcaagaagcaattgaatcttatgaaatcgagttaaatcaaaaaatatatcctattaaagccataagtaatttaagaggacattcaattaataaatatattatacatggtggtaaatgtgtacccatagttagacaaaaagaaaaaaatgaaattatggaagaaggagaattgtttgcaatagaaacttttgcatcaactggtaaaggatatgtaaatcatgaaaatgaatgttcacattatatgagaaatccagaaaaacaatttgtacccataagattaaattcagccaaaactttacttaaagttattaatgataattttgatactctacctttctgtaatagatggctagatgatttaggacaaactagacatttcatggctcttaaaactttaatagatctaaatattgttgaaccatatccacccttatgtgatataaaaaattctttcacatctcaaatggaacacaccatattattaagaccaacctgtaaagaggtactatctcgtggtcccgacttttaa

SEQ ID NO: 62 - protein, 628 aa, Plasmodium falciparum
MNKNNNKGSVKKNNNSKKKTSTNINNVNNLSSIKNIKNEQNVKNGDVNDEIATTTSSNHVNMVLNGNDEGIKDVKVVNNLNIDNKREDNNVRINVQGEETLNNDSKNKEAENKSNIKNNKSNQSNQSNKKTKNNNNNKNNNNNNNNNNNNNNNNNKNSTSNKKNSKNKKKVDKLDLILNEFKNDIKNEKGENNQNDNKLLNGAIETNNNNNNNNNNSGNNRIHFDKEEIKEIKKKIILKEHVLEEQDNSSIRLLKNWPQLEKTYQTNPPCIPIDMIYGKDGKYPVGEILEYNNYNLSGQSLVEKKEREKLSIDYYEDLRKAAECHRQVRKHMQAFIKPGKKMIDIAQETERKTKELILAEKLKCGWGFPTGCSLNHCAAHYTPNYGDETVLKYDDVCKLDFGVHVNGYIIDCAFTIAFNEKYDNLIKATQDGTNTGIKEAGIDARMCDIGEAIQEAIESYEIELNQKIYPIKAISNLRGHSINKYIIHGGKCVPIVRQKEKNEIMEEGELFAIETFASTGKGYVNHENECSHYMRNPEKQFVPIRLNSAKTLLKVINDNFDTLPFCNRWLDDLGQTRHFMALKTLIDLNIVEPYPPLCDIKNSFTSQMEHTILLRPTCKEVLSRGPDF

SEQ ID NO: 63 - DNA, 3042 bp, Plasmodium falciparum
atgaaaaaaataattatggttattttttttcttctaagcaagatatgtaaaaataatgctattttaaagtctttaaaaaagaataataaaatagttttaaaaaatataataaccaaaaaacaagagcctcatttatatcataaattatacaataatatttataataatatttacaataataataataagaagaagaataggaataggaataagaataagaataaaattaagattaagaagaaggagaataaagaagcctcttttttttatataaataattataagaaaaaactttttgacgaacaaggtaatacattaatattacataggaggaataactggattaataaaagagataatattgtggaaaattataagaacgtaaaagcaaaaaaacatcttttaaaattatttattagtaaaaataattatatatataatacaaaaatgttttcttcatgtattaataataattgtaatacgaacgatgtagaggttatgaaaaagaaacttgtggtaggagaaaatcctgaatttataaagaagagattagaaaagtttaatgaaataaaagaaaaacgtaaacaagaattagaggaaaattttgaagaattaaggaaacctataactatcgaattattagatggttctattaaatcaggagaaagttatgtgaccacaccttttgatatagctctttctatatccaaaaggttagctgaagattctatagtatgtaaggtaacgtatttagaaaaggtggacgtggaattatgtgacatagaagagggggatgaccacaatgaagaagccaacgatgaggttgaggagaagagtaaagaggataataatgaaaataataatgataataaaaataataatgataatgaaaataataatgataataaaaataataatgataataaaaataataattacaataattacaataattacaataattacaataataatagtcatataatgaaaagcattttgtgggatttaaacgttcctcttcttgggaactgcagagtagaatttattaatattcaatcagaagaaggacaaaaaattttctggcattcgtctgctcacattttaggtagtagtttagaaaaattgttcggaggatttttaaccattggtccagctttaaaagaaggattttattatgatatttttttaaataatttctctattaataatgaagattataaaagaatagaagatgaatttaataaattagttaaagacaatgtaccatttgaaaaggttatatgtacaaaagaagaggcattagaattatttgattataacccttttaaattagaacttataagatcaaagattccagataataagaagacttctgtttatagatgtgggaattttatagacttatgtttaggtccacatatcaagaatacaggaaaggtaaagacatttaaagtattgaaaaattcatcagcttattggttaggacaaaaagaaaatgatagtttacaaagagtatatggtataagttttcaaaaaaagagtgaattagtagaatatttaaaatttttagaagaagctaaaaaaagagatcatcgtaatgttgggaaaatattgaatttgtttttttttgaaaaagaaacatcaccaggttcatgtttttggttaccacatggttcaaaaatatataataaattaatagaatttataagaaaagaatatcgtataagaaagtatgaagaagttatatcaccaaacgtatttagttgtgatttatggaaaacatcaggacattatcagaattataaagattgtatgtttttatttaacgttgagaataaagaatggggaatgaaacctatgaattgtccaggtcattgtttaatgtttaaacaattaaatgtttcttatagatcattacctgtacgtctagcagattttggagttttacatagaaatgaaatatcaggaagtctgagtggattaacacgtgtaagaagatttcaacaggatgattctcatatcttttgttcaatggaacatataaaacaagaagttctaaatacattaaattttctcttttatgtttataatttatttggattcaaatatgaattattcctttcaacacgacctaagaaatttataggacaaatatctacttggaatctcgcagaacaacatttaaaggatgctctatacgcagcaaatgttcagtggaaaataaatgaaggagatggtgctttttatggaccaaaaattgatatactagtaaaggatagtttaaatagaacacaccaatgtggaaccatacaactggattttcagttacctgttcgatttaatttacaatataaaaataaagaatatgtaactaataacgaaaaaaatgaaaaaaatgaaaaaaatcatgacaatgatgataatgtacataacaataataattatcctattaatcatgatgatcttcataacaatgaaaagaaagaatttaaagattcacaaaatcataatgaagacaaagaacataataatatacatgataatcattcgttaaagccaaatataaatgaagaaggattattaaaaaaaggatttgaaagacctatcataatacatagagctattttaggttctgttgaaagatttgttgctatattaatagaacatacagctggaaaattacctttctggttatcaccaagacaagctattgtcttacccattggtgataaatataatgattatgctaattatgtatatgaaacattgcataataatatgtttgatgtagatctagatacctccgtcaatacattaaacaaaaaaataagagaagcacaattaaaacaatttaattatattctagttgttggtgaaaaggaattaacaacgaacactgtaactttaagggatagagatgatcaaaataatcaacatgtctataccattcaagaattaataaacaaatttaataagctattggatgtaaactctaagaaatttaaccaaataaaggaatttaactcaaaccaaaccatttaa

SEQ ID NO: 64 - protein, 1013 aa, Plasmodium falciparum
MKKIIMVIFFLLSKICKNNAILKSLKKNNKIVLKNIITKKQEPHLYHKLYNNIYNNIYNNNNKKKNRNRNKNKNKIKIKKKENKEASFFYINNYKKKLFDEQGNTLILHRRNNWINKRDNIVENYKNVKAKKHLLKLFISKNNYIYNTKMFSSCINNNCNTNDVEVMKKKLVVGENPEFIKKRLEKFNEIKEKRKQELEENFEELRKPITIELLDGSIKSGESYVTTPFDIALSISKRLAEDSIVCKVTYLEKVDVELCDIEEGDDHNEEANDEVEEKSKEDNNENNNDNKNNNDNENNNDNKNNNDNKNNNYNNYNNYNNYNNNSHIMKSILWDLNVPLLGNCRVEFINIQSEEGQKIFWHSSAHILGSSLEKLFGGFLTIGPALKEGFYYDIFLNNFSINNEDYKRIEDEFNKLVKDNVPFEKVICTKEEALELFDYNPFKLELIRSKIPDNKKTSVYRCGNFIDLCLGPHIKNTGKVKTFKVLKNSSAYWLGQKENDSLQRVYGISFQKKSELVEYLKFLEEAKKRDHRNVGKILNLFFFEKETSPGSCFWLPHGSKIYNKLIEFIRKEYRIRKYEEVISPNVFSCDLWKTSGHYQNYKDCMFLFNVENKEWGMKPMNCPGHCLMFKQLNVSYRSLPVRLADFGVLHRNEISGSLSGLTRVRRFQQDDSHIFCSMEHIKQEVLNTLNFLFYVYNLFGFKYELFLSTRPKKFIGQISTWNLAEQHLKDALYAANVQWKINEGDGAFYGPKIDILVKDSLNRTHQCGTIQLDFQLPVRFNLQYKNKEYVTNNEKNEKNEKNHDNDDNVHNNNNYPINHDDLHNNEKKEFKDSQNHNEDKEHNNIHDNHSLKPNINEEGLLKKGFERPIIIHRAILGSVERFVAILIEHTAGKLPFWLSPRQAIVLPIGDKYNDYANYVYETLHNNMFDVDLDTSVNTLNKKIREAQLKQFNYILVVGEKELTTNTVTLRDRDDQNNQHVYTIQELINKFNKLLDVNSKKFNQIKEFNSNQTI

SEQ ID NO: 65 - DNA, 9728 bp, Plasmodium falciparum
atgagtgatagaaaagaagataaaaatgatattatattaaataaaaatgaagaggaagataatataaacaataataatattatattgtacaaatcttttgatgatttcaaaattaattactcttataaaaccaaaaatcatcttcatgaaaatgataagattaaggaagaagatgatcatgaaataaaaagaaaattaataaaattgatcaacactaatttttacatagataaatgtatacatttcaaaaagttcagtaaagatgaactgtataaaacatttatatattccaattttttaactaaagcattaattttgtatccttctttaatgccttatgtggaatgtattatagaaaaaataaaaaaaataaaaaacgaaaacattacattttttccggctattgaacagtttaacttttctatagaacatgcagtaagtagttatcaaacggggacgcaaacatttaataatcatccgaacttttatactaattattatcagagttttataaaaaatgataatattccctatataaatcaaacaaacatttttgataataacataaaaaataagtacatgcttgatgataaatttggtagtacatcattatataataataataataataataataataataatgaaaataataatgataaatatttaaatacatattatgcatctcccagggggaatcaaatatataatttattccaagatataaataacaaccatcataataacaatattaatagttatagtaataataaatactttaattataatatgctcaataaaaataatttagaagaaacaagaagttatccaaataatgattatagaaatataattaacccaaataatttgaacagcaataatgtacatatgaataatatatatcctgaactaaataatacatacaacaacatgaataatacatatcatttaaataatgtacattcaaccagtctacaaaataattataaccctaacaataattttgatcattctatgaaaaatattaaaaatgaaacaaataataataataataataataataataataataataataataacaataacaataacaataacaataacaataacaataacaatatatactctccagaattggatacacatttacgtgtttataaaaacattaatgaatatgatattatagaattgaaaatatgcactacattaaacaataaatatatttgccgatatataggtaacacagaaaaatcaaaatatatatacatatatatatatatatatatatatatatatatatatgcatataatatatttgtgtgtgtatatacgtataatatttatattcattattttttaatattttttttttttttttttttaaatcacaatttttaggtattcacagtggcatgactttgtacaatattcacaggtgtatttgtatatgcttaggagtaaaaaaagaagataccgacaattatttacatgtatttattctaaataatggaaatatatacgggagtgggaaaaaatgtagtgttagtattataagaaaaatacaaataaataccgatcgacacattacattcaagcatataatcaagacacctttgtatctatataaatcaaaagaagataaaaacaaaaacaatagtaataataataataataataataatagtaataataataataatagtaataataataataatagtaatagtaatagtaatagtaataataatactaatagtaatagcaatagtaatagtaatagtaataataataccaatagcaataataatagtaatagtaatagcaataataataatagtaataataatactactactaataatagtagtagtagtaataatagtaataataataattattatcataataattataaaaatgaaaaagaattgaataattcttcctctcttgagcattccagtattattatgaataatgataatatacataataatataaataacaaccatattaataatattacagatttaaataatatgaacgtaaatcaaagcaacatgaaagaaaataataatataattgattatatgaacaataataataataatgataattacagtaataaccatttgaataattgcataaacaaattatatacaaataatatttattttactgaggattctcaaaaaaggaaccctctacaaacatataatacttcaaaaaatacgaataactttttgaatgtaaataattttacaagttcatataatttccctaatataaataatatggacagtaatatatataaccatacaacatgtaataattttaacaaaaatataaataataacattaatgatatatccattaataaacataacaatatatttaataatatgaatcatttaaatcatttagataaccattcttatattcaaaataatttatataaaaatcatatgaatgtaaatacaaacattctatataataatcctatcatgaataatattaacaatgatcaaataaataatttatctataccaaataataaaaatgaggataataatgaaatcaatcatgatgatagtaatgatgatgacagtaatagtagtcatataacattaaataaaagcgataaaaataaaaactattttgcgttaaatccaaaatatcaaaatcatcaaaatcataatataaacaataatatccaaaataatctaaacgaacaaataaaagaaaaaaatgatcaacaaaatcataatattaaagaaattaaaaataaagaattattaaatgataccatttcttctattgaagacactaatgataattcatattccaagtatattacttcttctgatatatcacaaaataatacacttaattcttttcaacataataaggagatttccgtaaattttatgtacaacaatataatacttgataacaataataacatcaatgatgacaataataataataataattatttttgtattccatgtggatacaatacaaaagaatataaatataatatatataatacatacaattatccaaataatgctaaccatatatacaataatatgaacatttcatataataacagtgcctacaacaataattatgttacatataataattttcataattcttaccataataattacattctacataataattttcataatccttacaatatatatgataacattcaaaatacagaacaaaaaaaattatataatatatatcaaaatgatgaaagacaaaacaattcatttaatcatattaatacagatcctcataaagttgtaaattcaaataattttctgcctattaatacatttcattataacaacaacttaaatcataacatattaacagaatcaaataatttaaatagaaaaaatgaaaatgataatattccttctagttattcacaaattcataatcatcaaatatgtaaaaaagtagaggaatatacctacaattctataaaccaaaacaccaataattttaataataatgtcatgatgttaatgaatacatcaaataacatccccctggataataatacttataattctaataaaaacaaaataatatataaacatattatcaatgatcatatcaatcaaaaggataataatgtggaatatgaaaatttaaataattcttgtgataatacacaaaataaggaaaccttttgtaatcaagatcttataaatagttctaatataaataataatataagttcctacacatttcaaaataataatgatttctatacaaaaaaaaaaagtatgcaatataatcatgataacatttacaaaataaatactacttcagaaaatgtaggaagcccacacaccaacaataaaacaagcatatataaccacaaaaaagggggatacgaacagcacacagagcagaacaatgaacagaacaatgaacagaacagtgaacagaacatcgaacagaacatcgaacagaatattgaacaaaatgttgcacaaaatgttgcacaaaatgttgcacaaaatgtcgaacaaaatgtcgaacaaaatgttgcacaaaatgtcgaacaaaatgttgaacaaaatgtcgaacaaaaggccgaacaaaatagtaataatgaatcaataaaaaccaatactgtagaaacatttaaaagaaataaaaaccagattaccaactcaaataatgtcatatcaaaacaacaacatgacacaaacaacatcttaaacaatatcaacataaatataaaagaaaatattaatagacataaaataaacgaattccaatgggaaaaatcaaacaaaatagatatcgaaaaaaacaactgtttaacaacaaaatatgataaagataatgataatgaaaatgataatgaaaatgataatacatataataaaaataatgacatagttatatgtaataatcataataattcatcacatgttcaaaaaaattactataatatgaatgaaagtatgataaatgaaaataatataataattactgaaggagaaaatttaatgaattcaactgaagaatattttactaatgaacttataaaaaaggactccttagaaaaaaataaatcagataccaaatttctaatcaaattaaataatgaaattaaaaaagaagaagaaaaaaaagataatataaatatcttcatcaataacaatatatatgaattaaaagaaattaatggaaataaaaacagatcagattattttcataatacaaaagatgataaagagaatataacaaatgtatcctcaaataatcatttaagtgtacctttaaataaatataatgatgaagacaaacaactaataaaacaaatgaatcatgcttctaatatgaattttatatatgattataattatcataataattatagttctacaaattcacaacaattaataaaaaataatacggaaaatctacactcattcaaaaacgagacacattccacatatgtaaaatatataaaaagtgagataaataacatgaacaattcaataggtgttccaacaaaaaaaaatgattacatgtacacaaattatttaaatatggaacatataaaaatgaataatatggaaaaagaaataataaaaaaaggaaacgataatgaaataaaaggtcaaagaattcaagtggaacatgatagagatgttcattataatacaactcaagaaaataacattataaataatcaaaaccctcaaacaaatcatgatggagatatgaatataaatattaactctaataaatttatgacccctaccactttaaaggaaaaatatcaaaataatatcaacacaaatgagcaacataataaaaatgaagaaaacaagaataaaaatgtaataaacaatacatcccaaatgattaatgataataatgttatacaaaatgatataaataatatgaacaataatgaaaatgaaaatgaaaatgaaaatctatatataaatgtacatacacaatataaatcggataatatattatcatgtgaaaaaaatttcataacactaaaaaataataatcataataatcataataataataataattattattattattatattaataatgataatattcacttaaataattctcatatcgatattatgaaaacaaataacatcaataaagatatgacaacaaattctacaccacattttaaacataatattatatcaaatgattgctcacctaataatattaatcagaacatttttgtagatccaaataaatatatatataacaacatacatacaaattataatgcatatcatgaagaaagtttacaagttgtaggtaatcacaattcatcatctcttttacgaaatatcaacgaatcattttctaatcaatatgataataaaaaaaatttagaagcacaccatattgatgatgataaaaataaagaagcatttcataatgatgatgataaaaataaagaagcatttcataatgttgatgataaaaataaagaaacatttcataatgatgatgataaaaataaagaagcattacataacgatgatgataaaaataaagaagcattacataacgatgatgataaaaatgtagaagcataccataatgataattataatgataattataataataattattactttgatggaaataataatatgcaagatgaatccttttattcaaataactctcatgcagaatacaatcaaagtaacatagaatatatatcaaattatgataagaattattctcatatacaacaatatacaaatggtttttgttatacaaataataatcaatatataaataacacagagttaactaataatagttcatatatatataataactcatatatgaataataatacatattcatttaataaagaatattctgataataacatgtgtcatcataaaaatgataacattcatatgattaatgatgtagcaacaaagcttaaccaacatcccatgaacatgtacaatagtaataacaataatattatttataataataataacaaccaaatttatgataacaatattaataacatgtacaacgattactataattataataataataacatgtacaacaattactataattataataataataataacatgtacaacaattattataactatagtaataaaaatttttatatgaatgaaaagtatacagaaggtgcaacaaattttatgaacatagatgatatgaaagatgcaggaaatgaaaacaatatgcatattttaaataacaattctataaaccaaacatattaccactcaaaaattaaaaataataataataatgatgatgatgataataataataataataataataataataatgataataatgataataataatataatgatgcataacaattatcaacccttcctatatgaaaatcagtataataaacatatacatatgatgaaccaacaaatacaaaaagagacaaatactagttttaaacatataacatgtaatcaaaaatttattgaaaataataagataaacatatcaaatgatcaaaatgttactaatatgcctattttatatagtatgaataaagaacaatatatcaacatatctaaccataacaatgggtgtaattatgataacatcaattctattaatgtttatgaaaataacaatgaatatatcgcgccaaagaatatgttatataaaagtgaagaaaaagaaaatctttataattcttcatctatatataatcaaaattatgaacaaaaatatattaattacatgaataatgctagctatataatgaataataacatgaacgattatacaaataattataatgtacaaaatttcagaacgtttaaaaataatgtcttccaacaacctttatcttattcaaacggttctgaagctatgctacatgcgagtgaatttaatcaaggaataaataaagaaaattttcaaggagaatatgtttctaacttggtaaattcatataaagataatgttaataatgtagaaggcgtgttgggtataaagaaggataaagaaaacgataataatgaggaagaaaatgatgaagaagaaaatgatgaagaggaaaatgatgaggaggaaaatgatgaggaagaaaataatgaggaagaaaataaggaggcacaaaataatgaggaagaaaataataatggagataataataatggagataataataataatggagataataataataatggagataataataacaatggagataataataataatggagataataataataataacattttttataatatggaaggttcacaaaaaatatgtcatgatgatattactttaaatgaatgtctaaactcaatcgatataaacgaaggagaaaaaaaaacctttgaagaaaataaatcaagtttttctatgttatatttattcgggaaagtaaaattttatattagtattattgatattatacataataaaaccaattctcatgatttattatgggtacctagatgttgtaatggaagttatgggacctttttaaaatataattattcaaatatgaatgaaataaataaatatacacatgatgaaggaatcgatatagattctattaatttgaaattaatggaaactagattcagtaaaaatgtagctagctccagaacaacaaaaagaaaaagaatgatagacattgataaaacagttttacattattataaagaacatataagtgaattctttaatgataaaaataaaattataaaattaacaaaaaaactttgtaaatataaaaaaaaaagaaaatttaatgatacacaaaaaaagggaacatataaagatgaaaaggattatgataattatgatgtcctcccgaatggtgatgaacaaaaccatgaaaacaaaaaacaagaagataataataataataatgatgataataataataaaaataaaaataacgatgatgataataataataataataataacaataacaataataatgataacaataataagaataaccataataatgataacaataataatgataacaataataagaataaccataataataataataatgataaccataaaaacaatagtaataataaggctaaaggtaagaatatggggaagggaaaaaaacaaactcctaatcgaatgaataatacaaaaaatgttcaaaatggaaaaaatacaaaaaatataaataatataaaaaatataagtaatatgagtaatatagaaagtataaatagtatgactagcataaaaagtgtggatggtgaaaataggatgaacaacacaattaatatgaatggtatgaataaaacagaaagtataaataatatagaaattacacaaaatatgaatactattaacagtataaataatataaacggtataaataatataaacggtataaataatgtaaacggtataaatcatacaaacggtataaatcatacaaacggtataaataatataaacactatgaacaatatgaacaatatgaataatataaaccatataaataatataaacaatatgaacaatatgaacaatatgaacagaataaatagtttaaacaataaaaataatattaaccctataaatcagtacaatgatgaaaaacaaaatctacttaacagccatcttcaattcaatcaagtaaattatcataataaccttgtgaatggtcttcataaaaacaattttttaagcaataataattatattaatactacagatattaatggaaataatatgattagtcataatgatcatatgaataataaattatacagtaatataaacaataattattattataatagggctaacaatgaaattcctaataataatagtaacaatcataataataatttcaatatatatgaatccaaataccaaaccatgattcataacaacaacataggacaagatctaaaacaacaaataaataattataatgaaaatacatcttctaataataatttaagtatatctcaattacttgagggaaatacaaattttataaatatttctaatacatttattaatacgaattattctaatgattttcatcaaacaaatgacttattagtaaatcacaataatatagacttgaaatatttgtctgacaatattaatacaaatacatataatgaacaataa

SEQ ID NO: 66 - protein, 3188 aa, Plasmodium falciparum
MSDRKEDKNDIILNKNEEEDNINNNNIILYKSFDDFKINYSYKTKNHLHENDKIKEEDDHEIKRKLIKLINTNFYIDKCIHFKKFSKDELYKTFIYSNFLTKALILYPSLMPYVECIIEKIKKIKNENITFFPAIEQFNFSIEHAVSSYQTGTQTFNNHPNFYTNYYQSFIKNDNIPYINQTNIFDNNIKNKYMLDDKFGSTSLYNNNNNNNNNNENNNDKYLNTYYASPRGNQIYNLFQDINNNHHNNNINSYSNNKYFNYNMLNKNNLEETRSYPNNDYRNIINPNNLNSNNVHMNNIYPELNNTYNNMNNTYHLNNVHSTSLQNNYNPNNNFDHSMKNIKNETNNNNNNNNNNNNNNNNNNNNNNNNNNNNIYSPELDTHLRVYKNINEYDIIELKICTTLNNKYICRYIGIHSGMTLYNIHRCICICLGVKKEDTDNYLHVFILNNGNIYGSGKKCSVSIIRKIQINTDRHITFKHIIKTPLYLYKSKEDKNKNNSNNNNNNNNSNNNNNSNNNNNSNSNSNSNNNTNSNSNSNSNSNNNTNSNNNSNSNSNNNNSNNNTTTNNSSSSNNSNNNNYYHNNYKNEKELNNSSSLEHSSIIMNNDNIHNNINNNHINNITDLNNMNVNQSNMKENNNIIDYMNNNNNNDNYSNNHLNNCINKLYTNNIYFTEDSQKRNPLQTYNTSKNTNNFLNVNNFTSSYNFPNINNMDSNIYNHTTCNNFNKNINNNINDISINKHNNIFNNMNHLNHLDNHSYIQNNLYKNHMNVNTNILYNNPIMNNINNDQINNLSIPNNKNEDNNEINHDDSNDDDSNSSHITLNKSDKNKNYFALNPKYQNHQNHNINNNIQNNLNEQIKEKNDQQNHNIKEIKNKELLNDTISSIEDTNDNSYSKYITSSDISQNNTLNSFQHNKEISVNFMYNNIILDNNNNINDDNNNNNNYFCIPCGYNTKEYKYNIYNTYNYPNNANHIYNNMNISYNNSAYNNNYVTYNNFHNSYHNNYILHNNFHNPYNIYDNIQNTEQKKLYNIYQNDERQNNSFNHINTDPHKVVNSNNFLPINTFHYNNNLNHNILTESNNLNRKNENDNIPSSYSQIHNHQICKKVEEYTYNSINQNTNNFNNNVMMLMNTSNNIPLDNNTYNSNKNKIIYKHIINDHINQKDNNVEYENLNNSCDNTQNKETFCNQDLINSSNINNNISSYTFQNNNDFYTKKKSMQYNHDNIYKINTTSENVGSPHTNNKTSIYNHKKGGYEQHTEQNNEQNNEQNSEQNIEQNIEQNIEQNVAQNVAQNVAQNVEQNVEQNVAQNVEQNVEQNVEQKAEQNSNNESIKTNTVETFKRNKNQITNSNNVISKQQHDTNNILNNININIKENINRHKINEFQWEKSNKIDIEKNNCLTTKYDKDNDNENDNENDNTYNKNNDIVICNNHNNSSHVQKNYYNMNESMINENNIIITEGENLMNSTEEYFTNELIKKDSLEKNKSDTKFLIKLNNEIKKEEEKKDNINIFINNNIYELKEINGNKNRSDYFHNTKDDKENITNVSSNNHLSVPLNKYNDEDKQLIKQMNHASNMNFIYDYNYHNNYSSTNSQQLIKNNTENLHSFKNETHSTYVKYIKSEINNMNNSIGVPTKKNDYMYTNYLNMEHIKMNNMEKEIIKKGNDNEIKGQRIQVEHDRDVHYNTTQENNIINNQNPQTNHDGDMNININSNKFMTPTTLKEKYQNNINTNEQHNKNEENKNKNVINNTSQMINDNNVIQNDINNMNNNENENENENLYINVHTQYKSDNILSCEKNFITLKNNNHNNHNNNNNYYYYYINNDNIHLNNSHIDIMKTNNINKDMTTNSTPHFKHNIISNDCSPNNINQNIFVDPNKYIYNNIHTNYNAYHEESLQVVGNHNSSSLLRNINESFSNQYDNKKNLEAHHIDDDKNKEAFHNDDDKNKEAFHNVDDKNKETFHNDDDKNKEALHNDDDKNKEALHNDDDKNVEAYHNDNYNDNYNNNYYFDGNNNMQDESFYSNNSHAEYNQSNIEYISNYDKNYSHIQQYTNGFCYTNNNQYINNTELTNNSSYIYNNSYMNNNTYSFNKEYSDNNMCHHKNDNIHMINDVATKLNQHPMNMYNSNNNNIIYNNNNNQIYDNNINNMYNDYYNYNNNNMYNNYYNYNNNNNMYNNYYNYSNKNFYMNEKYTEGATNFMNIDDMKDAGNENNMHILNNNSINQTYYHSKIKNNNNNDDDDNNNNNNNNNNDNNDNNNIMMHNNYQPFLYENQYNKHIHMMNQQIQKETNTSFKHITCNQKFIENNKINISNDQNVTNMPILYSMNKEQYINISNHNNGCNYDNINSINVYENNNEYIAPKNMLYKSEEKENLYNSSSIYNQNYEQKYINYMNNASYIMNNNMNDYTNNYNVQNFRTFKNNVFQQPLSYSNGSEAMLHASEFNQGINKENFQGEYVSNLVNSYKDNVNNVEGVLGIKKDKENDNNEEENDEEENDEEENDEEENDEEENNEEENKEAQNNEEENNNGDNNNGDNNNNGDNNNNGDNNNNGDNNNNGDNNNNNIFYNMEGSQKICHDDITLNECLNSIDINEGEKKTFEENKSSFSMLYLFGKVKFYISIIDIIHNKTNSHDLLWVPRCCNGSYGTFLKYNYSNMNEINKYTHDEGIDIDSINLKLMETRFSKNVASSRTTKRKRMIDIDKTVLHYYKEHISEFFNDKNKIIKLTKKLCKYKKKRKFNDTQKKGTYKDEKDYDNYDVLPNGDEQNHENKKQEDNNNNNDDNNNKNKNNDDDNNNNNNNNNNNNDNNNKNNHNNDNNNNDNNNKNNHNNNNNDNHKNNSNNKAKGKNMGKGKKQTPNRMNNTKNVQNGKNTKNINNIKNISNMSNIESINSMTSIKSVDGENRMNNTINMNGMNKTESINNIEITQNMNTINSINNINGINNINGINNVNGINHTNGINHTNGINNINTMNNMNNMNNINHINNINNMNNMNNMNRINSLNNKNNINPINQYNDEKQNLLNSHLQFNQVNYHNNLVNGLHKNNFLSNNNYINTTDINGNNMISHNDHMNNKLYSNINNNYYYNRANNEIPNNNSNNHNNNFNIYESKYQTMIHNNNIGQDLKQQINNYNENTSSNNNLSISQLLEGNTNFINISNTFINTNYSNDFHQTNDLLVNHNNIDLKYLSDNINTNTYNEQ

SEQ ID NO: 67 - DNA, 4257 bp, Plasmodium falciparum
atggataccaagagtggagataaaaatgctgcaaataagggaggagctgatgggcttgtaaagactgtgtcagtattactacgagataacaaatgtcagtttaatattgatgaaaattatgatcataatgataaagagaaattagagtgtgaggtaggtaaacgtgatagtggtatgataaattgtttgatggagaaattgacatctaagaaatttttagaagagaaagaaagtaaaaatagtttttatttagtagataatgaaaatatgaaaataaaaaaattaaaagaacatggtcattcagcttcattaaatgatgatttaagtccattacaatatgaaagaacaaaatatataccaagcttacccaaagctttagctagtgaatatcaaatattagatgaaaattatggagatgaatttataaataaaaatgattatgaagatgtaaagaggtttttaaaaaatttacataatttaccaatgctaaatgttaaagatagtaataataatgaatcatttaaaggtggaaatattttaaaaattggtattattttatcgggtggtccagctcctggtggtcataatgtaatatctggtatttatgattatgctaaacgatataatgaacaatcacaagttattggatttcttggtggtattgatggtttatatagtaaaaattatgttactataacagatagtatgatgaatcgatttcgtaatttaggtggttttaatatgttatggtcaggtagaggaaaagtaaaaaataaagatgatttgattgctatcgaaaatattgtagccaaattaaaattaaatggtttagttattattggtggtgatggctcaaatagtaatgctgctttaatggctgaatattttgctgaaagacaaattcctatatccattattggtgtacctaaaactattgatggtgatttaaaaagtgaggctatagaaattagctttggttttgatactgctactagaacatactcagaaattattggaaatttatgtactgatgtaaaaactggtcataatgtataccatgttgttcgtgttatgggtagatcagcatcacatgttgttttagaatgtgctttacaaacaagaccaaatgttgttctaattggtgaagaagttgaacaattgaatttgtcccttaaagatattgttaaaaatattgttaatattatattgaaaagaaaatcattaaataaaaattatggtgttatcttattacctgaaggtttaattgaatttgtacctgagatgaaaatattaatttctgaattaaatgttatattaaaagatggtccatttgatgcttcgaaacttcaaaagtctaaagaagtttgggatttcttaccacctattattagagatcaattgttaatggatagagaatcaactgggtatattcaagttggaaaaatcgcaaccgaaagattaattattgtattagtagaatctgaactagccaaattaaatgataaaaacctaaatatacaatttatgtcacattatctaggttatgaaggtagatgtgctataccatcaaattttgattgtaattattgttatgcattaggttacaatgctgcacttttaattgatcataaaaaaacaggatatatgtcgattattagaaacttggaagattcatataccaattggataccagctgcaattccatttttacgaattatgcatgtaattaaagataacacaggtaatgaattcccagctgttaaaagatatttagttgatttaaatagtccattatttaatgtattaaaggaagtaaggagtttgtggtctctttatgatttatatagatctccaggacctatccaatttaatggccatttaggtaatgcacgttgttatactgtaaagactccaacaaaggataatttgttatgtcagaatgccgatgatttagagcttattataaatctaactaacaagaatatgtatgaaaataatggggacaataatcataatatatctgacgataaagcaagggatggtggatcatcaccaacaagttctgctaagaaaacaaagtacaatctaagtgatgataataataataataataataataatatcaataatgtaagcactaattataataatacatcagatggatccacctttggtaatactaccttattaaatacagcctataatgtaaatggtgatggaatgaatactttaaattgtcaaaaaagcaatacatctgatgttttgtcttcagaacctgtaaaccaaggattttatgaacaacatgcatctagttataaatcattaggttgtatgtccgaattacaaacatctaggttgtataataaattagaattgcccgaattatgttctgatttgaaagcaaaggttagagcaggaaaacagtatatatccaatgatccatatacacaaaaacaaatcttatcaaattaccctcatatgtcttatgagaacaaatttcagatacaagaaatatttcatgataaatatgctagtcccatttcttttgaaataagaattggtatagtatttttatcaagacaggctccaggtgctatgaatgtgttatgtggtttatataggcgtttgaaattattaaaaggtgtttgtattgcattttacggattatatggattattacataataaatacattataatagatgatgataatatagcaaaatacgtaaatcaaggaggtttagaattaactggcaattctccagagcattcattatttgataaagaaaatagaaataaagtatgtgagacagttacaaaattacaattgaatggtttagttatgccaggatctaatataactattacagaagctgctttattatcagaatactttttagaaaaaaaaatacctacatctgttgttggtataccattaacaggatctaataatttgatacatgaattaatagagacatgtgttggttttgatagtagtacaaaagtatatgcatcattaataggtaatgtattgacagatgctgtaagtatgcctaagtattggcattttattcgtttaatgggaagatctccatcacatgaggttttagaatgtgctttacaaacacatccaaatgtagttattatatcagaagaatatggagctgcagataaaacattatggagagttgttcaagatattgctgatgttgtatgtgcacgagctgatgttggaaaaaattatggtactgtattaattccagatgctttattgatgcacttaccacatatgaaaatattattatctgaaataagtgatatattaaatgaggcatcagaaaaaggccaattattagaagcaagaaatgatttagtaaatttatctggtgtggatcatggtcacttaacatcagaatgggtttctaaattaacaccatggagtttagcattattaaagacattcccacaatttattataaaagaattattacaggtagatttgagatctatgcgttttgaacaattagaaactgaacaattattattacaaatggttaaagaagaattacaagatagaaagcaaaaaggaaaatattcaggaagtttcatgggcttaacacacttttttggttatcaaggacgttcatcattaccatcagaatttgattgtaagttagcatatgcatatggacatgcagcatcaatagttattgaaagtggcttaacaggatatattgtatctataagaggattatgtggtaatgttaaagattggaaattatttgctataccattcatatcattaatgaaaatattaccaaaaggacaaggaagtaaatatttaaaaagtgcatctaaaggtgatttaccagtaattcctagtgcacctgtagatttgaatggaaaagcttatagaagcttaaaaattgctttacaaaaatggcaaatggaagatcgtttttgtaatcctggaccaatacaatttgaaggtaatgcatctaattattataataggatattatttgaagaacaatctgaatattttgaaatgttaagatatgttgaatgttatgcaaatattttaaaagatacttgtcgttttggtgtctcagctgattatctgaaaaatgtatttgtacagttatgtggtatgttggtattagcatataagcctaatgatatcttatctaatatgccatatattggaagtatagaagattattatgattgggaaaaccagagaaaaagaatgaactaa

SEQ ID NO: 68 - protein, 1418 aa, Plasmodium falciparum
MDTKSGDKNAANKGGADGLVKTVSVLLRDNKCQFNIDENYDHNDKEKLECEVGKRDSGMINCLMEKLTSKKFLEEKESKNSFYLVDNENMKIKKLKEHGHSASLNDDLSPLQYERTKYIPSLPKALASEYQILDENYGDEFINKNDYEDVKRFLKNLHNLPMLNVKDSNNNESFKGGNILKIGIILSGGPAPGGHNVISGIYDYAKRYNEQSQVIGFLGGIDGLYSKNYVTITDSMMNRFRNLGGFNMLWSGRGKVKNKDDLIAIENIVAKLKLNGLVIIGGDGSNSNAALMAEYFAERQIPISIIGVPKTIDGDLKSEAIEISFGFDTATRTYSEIIGNLCTDVKTGHNVYHVVRVMGRSASHVVLECALQTRPNVVLIGEEVEQLNLSLKDIVKNIVNIILKRKSLNKNYGVILLPEGLIEFVPEMKILISELNVILKDGPFDASKLQKSKEVWDFLPPIIRDQLLMDRESTGYIQVGKIATERLIIVLVESELAKLNDKNLNIQFMSHYLGYEGRCAIPSNFDCNYCYALGYNAALLIDHKKTGYMSIIRNLEDSYTNWIPAAIPFLRIMHVIKDNTGNEFPAVKRYLVDLNSPLFNVLKEVRSLWSLYDLYRSPGPIQFNGHLGNARCYTVKTPTKDNLLCQNADDLELIINLTNKNMYENNGDNNHNISDDKARDGGSSPTSSAKKTKYNLSDDNNNNNNNNINNVSTNYNNTSDGSTFGNTTLLNTAYNVNGDGMNTLNCQKSNTSDVLSSEPVNQGFYEQHASSYKSLGCMSELQTSRLYNKLELPELCSDLKAKVRAGKQYISNDPYTQKQILSNYPHMSYENKFQIQEIFHDKYASPISFEIRIGIVFLSRQAPGAMNVLCGLYRRLKLLKGVCIAFYGLYGLLHNKYIIIDDDNIAKYVNQGGLELTGNSPEHSLFDKENRNKVCETVTKLQLNGLVMPGSNITITEAALLSEYFLEKKIPTSVVGIPLTGSNNLIHELIETCVGFDSSTKVYASLIGNVLTDAVSMPKYWHFIRLMGRSPSHEVLECALQTHPNVVIISEEYGAADKTLWRVVQDIADVVCARADVGKNYGTVLIPDALLMHLPHMKILLSEISDILNEASEKGQLLEARNDLVNLSGVDHGHLTSEWVSKLTPWSLALLKTFPQFIIKELLQVDLRSMRFEQLETEQLLLQMVKEELQDRKQKGKYSGSFMGLTHFFGYQGRSSLPSEFDCKLAYAYGHAASIVIESGLTGYIVSIRGLCGNVKDWKLFAIPFISLMKILPKGQGSKYLKSASKGDLPVIPSAPVDLNGKAYRSLKIALQKWQMEDRFCNPGPIQFEGNASNYYNRILFEEQSEYFEMLRYVECYANILKDTCRFGVSADYLKNVFVQLCGMLVLAYKPNDILSNMPYIGSIEDYYDWENQRKRMN

SEQ ID NO: 69 - DNA, 5735 bp, Plasmodium falciparum
atgctagacctcgaaacaaattccaacaacaacaaaaagggaatgaataaggttgaagaaaagaatatgaataaaaagtggattgtaatgggagataataatgagaataatgagaagataaaaagtagctataataatgaagatgatgagtatatggaagctgtgcaagatgaatcgaatatgattaataagatggataattatatgaattattctgatcagaggactcaagtatatcctatgagtagaactacaacacctaatgtaataaacagtataagtatggagagtatgaatgatggagttatgtatcctaatgtttcgaagagtggacttgtgagtaatgaagaattgaataatttggatatgaaaggattgataagtgaagataataataataataataataaaaataatgatgatagtaataatgaggacagtaataatgatgaagataatattaataataataataataataataataacattatataccatgagcaacatgttgaggaatatgaaaagactcatcatgtgagccatccaaaagataacggtaaatattcaaatagtgaagatgctgatatggtaggatatgaatcagctaatatcgaatttgagatgaatgaaaaaagattaaatcttcaagaaagtgacgaaaaaataaataaccatatggaggaccatatgaatgattgtgaaaattatgaagatgaagatcctggacattatgaagaagatgataataataaaaatgaaaaattaaatgaaaataataatttatatttaaattgtcttagtgatagttatgacgaaaataatgttataaaaaaaaaagatgcaacttcaggttcattattatataaagatgatattataggtagtgatgcttataataagaaacatgaaaaaactttagattttaatgagaagaatcatcaatcggattgtagtaataataataataataataataataataataataataataataataacaatgcaagtatctatttagataagatgtgtgatgaagaggccgaagccgaagaaaatgtagaaatggacggcgaagaagataatgatgatggtgtgaacaatggtaagaataaatataatataaattgtaataaaaataattcaagttcatataaagaagatgtaataaaatctctaaattgtcagtataaagaggaagatgatgaatatcaagataatgattataatgatgacatgaataatgaaaatataaagaataccttattaaaagaattattaatagctaacaaaaatggatctatagatccacatgagattatgcatccttctggatgcggtattaataagaataaggctttctcagtaataatagataatttattaaatttgaaagatgatgatgatttgagtattaaattgaatagatacttaaaaaatgagaaagctgatatggaaaataatactataaatgaaggtaacaataataataataataataataatggtaataataataataatggtagtaattatcatatgaatcattgtatgaatacgggtggtagtaagaaaaagaatgttaatgtaaaaagccatgttaataaaaataataatgattcctttgagaatttaaaaaagttaaaagttctttgtgtagattatttaagaattttgaaaagattaacacctttatggggttcgaccgatagaacgtttgaatcacattatgtaaacttattaaataatgtaaactcgaatacgttggataattatttatgttgtttttctaatattaagatatgtgcagtgaagagtatctttttagattccataatggagtgtatagaagagttagaaattattaagaaatttaaaatgtctaaagagaaggaggatggtattgaagataaggatatgaatgataaggaggagatgaataagaaaattttggaagatatagaaaagaatttgacaaaggaaattgttgaagatatttttcaattgaatatgagaaatccatatatagtgaatagttatggaaacaacagcaccaataataataataataataataataaaagtaattgtagtaacaataataataatagtagtagtagtaatagtagtagtagtagtcttaataataataataataataataatagtgtgtcttgttccgatggagaatcccaatatcatcaacagggagataataacaagataggagcacataatttattatataatatgtctggaaaacataataataatacatgtaataatggttttaatgtatattatgatttaaaaaaaggaaaggaatgtcaacataataattcttgtggtaacaatagaaattcatgtaatttattatctagttcaccaaataatcatacatgtggtacaaaccatggtaataataattatacaagctgtgctaataactcatcgagtttaaattattcaaatatatttcctttcaattgtttgaatacgaataaaaatgctatttcattaagcaataatggaaatgtgggttctacaccagtagtaaataagaacaacaacaataataataataataataataataatagtaataataataattattctgcagtctcttctggggcatatcataaaaaaagttgtaattattcggatgaaaatattcttaacaaattaaatgtaagtatagattacagttcatacaatgattttaataataactatatccaagaagctgaaaaggtcgtagaaaaatataaaaatttaagcaaactaaattctaaggatagtgataatatgtatagtacctgtagccattctagtgtccaggataatattagtagtgctaatcttaatacttacttacaattaaaaatgcttatgtctgagtatgcaaatacgtgtgtaaagaatgataaaattaaactaaaggatttggataacaacatgagtgatttgaatattcttaagtatttatattctcaattgaatggtggttctctcctagaggtaaaaataaagagcaccacaatgtgtataaataaataaatatatatatatatatatatatatttatttatttatttatttgtatgtatgtgtttatatttatttatatgtgtttatatttacttatatgtgtttatatttacttatatgtgtttatatttacttatatgtgtttatatttatttatatgtgtttatatttacttatatgtgtttatatttttttttttttttttttttttatattaggataagaatatttcagagttgtatcaactcgatggagaaactaaggatgctaaaaattattatgacaataaattaaagctcgagtgctctagtgctagcgatataaataaatttttacaagattataaattgaacgatgatgataattatgaagatagagagggttactcgaagtatgataaagagcaaggattattgttgaatggtaatgatactaatatgaattacttatcgagtagtttacaaaatatgatgagaaaacgaaaacattatgataattacacatcaacaaataataccacaactaataataataataataataatattaatagtagtagtagcaataataatgttaacaacctaaataacaattctctttctgatttgaattatttattatacaatactaatgtacttaaaaaattaaaattgaatttactagaaaataagaaaggtaacaatataaatagtacacataatggattgcagaatcttacgggtagtagtagtagtagcagccttgtgacctctggagttatggggaataatgattatcgaaaaaaagatacgaatgagttatatatggatgagaataatgttatccctggtcacatgactacaagaaaatcatatgcatctaataagaataatttattaaataacataaagaattttaaggatatattaaatttatctcaagaaagtttaaataaaaagggtatgggaaattcttataaaaattcatttgatcatataaatccgagtactttatatgattttatattaagtactaataatgcgaataatataatggagagttctgttcacgtaggaactggcaacaacaacaataataataataataataatataatgatgaatactattggtagtaataatagtagtataaataatagtaatcataacaatagtaatggattacataacagtagttatcacaatcttaataataatactaatggtcatcataataatatgaataagaaaaatagctatgactataacacggattataattctaaggttagtatgaatgattctgaattatcgttaaataatcatgataataataatgatgtaataataaataataatatgcatggaggaaagaatataagtaataagatgggcgatggagtaataaattataaaaagggtgatatgaataataagtccttatctgcccacaatgcaaataataataataataataataataatggtaatggtaatagtaacaagaatacaaagaatattaaaaataatacaaacggtacaaacagtactacaaacagtacaaataatgcaaatggtaataacaataataataataataataatggaaataataataactatacaggtgggaaattaaaatatgaaatgcctgtaggggtaaatccaaatgatgataaggttaagggtgtttacttttctaaatctccaagaggtgttggtaaatggaatgcatattttcaaattgcaaataataaaagattgtttacaagttttagtgttagtaaatatggatataatgaagccaggaaattatctatattgaaaagaactgaatgggaaaaagagtataagcatcatactgatttaaagaattctgatggaaaaaaaggaaaaaaaaaagcgaatagtgtagttgcggcaacatctacaagtagtaatttgattaaaaataataataataatcaccatcataataatcatcatcatagtaataaaaatatatctaaaggaaattcaaatagtagtgatgggtctataacatatgcaaaagataataaattgaaagatgatgcattattatattctaatgatgatgaagatgaagatgaaggttgttatcttggtaataataaaatgaatcatgtaaataaaaataacaacaacaacaacaacaataataataataataataataatgttttatcagggatgttggatttatcaaatgatttattagatcatcatttgacaggtggtacaagtaaaaagaaattaaacaaattgaatcatatatcatctaatcatgattatattaaagttgaagataatatgaacttttttattgaacgaccaaaaaatgataatatagatacatttaatactgtagatttgttacgatcaagtttagcaggtgaaaaaataaattctaaaaaaaatcacatgaataataacaataataataataataataataataataatcatttttcttcaaattcattaggacaagcagctattaacgtttataataatgtaatggatagtaataaacaatcttctataaatgcctccagaattttatcgaatactttagggatatcaaataagtatataagaaatttacatttcccttcaatagattcgcacacggttagtaacttcctagatgccgtagcagatgatcaaaaaatttcttcctaa

SEQ ID NO: 70 - protein, 1828 aa, Plasmodium falciparum
MLDLETNSNNNKKGMNKVEEKNMNKKWIVMGDNNENNEKIKSSYNNEDDEYMEAVQDESNMINKMDNYMNYSDQRTQVYPMSRTTTPNVINSISMESMNDGVMYPNVSKSGLVSNEELNNLDMKGLISEDNNNNNNKNNDDSNNEDSNNDEDNINNNNNNNNNIIYHEQHVEEYEKTHHVSHPKDNGKYSNSEDADMVGYESANIEFEMNEKRLNLQESDEKINNHMEDHMNDCENYEDEDPGHYEEDDNNKNEKLNENNNLYLNCLSDSYDENNVIKKKDATSGSLLYKDDIIGSDAYNKKHEKTLDFNEKNHQSDCSNNNNNNNNNNNNNNNNNASIYLDKMCDEEAEAEENVEMDGEEDNDDGVNNGKNKYNINCNKNNSSSYKEDVIKSLNCQYKEEDDEYQDNDYNDDMNNENIKNTLLKELLIANKNGSIDPHEIMHPSGCGINKNKAFSVIIDNLLNLKDDDDLSIKLNRYLKNEKADMENNTINEGNNNNNNNNNGNNNNNGSNYHMNHCMNTGGSKKKNVNVKSHVNKNNNDSFENLKKLKVLCVDYLRILKRLTPLWGSTDRTFESHYVNLLNNVNSNTLDNYLCCFSNIKICAVKSIFLDSIMECIEELEIIKKFKMSKEKEDGIEDKDMNDKEEMNKKILEDIEKNLTKEIVEDIFQLNMRNPYIVNSYGNNSTNNNNNNNNKSNCSNNNNNSSSSNSSSSSLNNNNNNNNSVSCSDGESQYHQQGDNNKIGAHNLLYNMSGKHNNNTCNNGFNVYYDLKKGKECQHNNSCGNNRNSCNLLSSSPNNHTCGTNHGNNNYTSCANNSSSLNYSNIFPFNCLNTNKNAISLSNNGNVGSTPVVNKNNNNNNNNNNNNSNNNNYSAVSSGAYHKKSCNYSDENILNKLNVSIDYSSYNDFNNNYIQEAEKVVEKYKNLSKLNSKDSDNMYSTCSHSSVQDNISSANLNTYLQLKMLMSEYANTCVKNDKIKLKDLDNNMSDLNILKYLYSQLNGGSLLEDKNISELYQLDGETKDAKNYYDNKLKLECSSASDINKFLQDYKLNDDDNYEDREGYSKYDKEQGLLLNGNDTNMNYLSSSLQNMMRKRKHYDNYTSTNNTTTNNNNNNNINSSSSNNNVNNLNNNSLSDLNYLLYNTNVLKKLKLNLLENKKGNNINSTHNGLQNLTGSSSSSSLVTSGVMGNNDYRKKDTNELYMDENNVIPGHMTTRKSYASNKNNLLNNIKNFKDILNLSQESLNKKGMGNSYKNSFDHINPSTLYDFILSTNNANNIMESSVHVGTGNNNNNNNNNNIMMNTIGSNNSSINNSNHNNSNGLHNSSYHNLNNNTNGHHNNMNKKNSYDYNTDYNSKVSMNDSELSLNNHDNNNDVIINNNMHGGKNISNKMGDGVINYKKGDMNNKSLSAHNANNNNNNNNNGNGNSNKNTKNIKNNTNGTNSTTNSTNNANGNNNNNNNNNGNNNNYTGGKLKYEMPVGVNPNDDKVKGVYFSKSPRGVGKWNAYFQIANNKRLFTSFSVSKYGYNEARKLSILKRTEWEKEYKHHTDLKNSDGKKGKKKANSVVAATSTSSNLIKNNNNNHHHNNHHHSNKNISKGNSNSSDGSITYAKDNKLKDDALLYSNDDEDEDEGCYLGNNKMNHVNKNNNNNNNNNNNNNNNVLSGMLDLSNDLLDHHLTGGTSKKKLNKLNHISSNHDYIKVEDNMNFFIERPKNDNIDTFNTVDLLRSSLAGEKINSKKNHMNNNNNNNNNNNNNHFSSNSLGQAAINVYNNVMDSNKQSSINASRILSNTLGISNKYIRNLHFPSIDSHTVSNFLDAVADDQKISS

SEQ ID NO: 71 - DNA, 17274 bp, Plasmodium falciparum
atggattatgttcatccagtggacgtaagtaaagttattcatgggaatgagtcattctttacgttcattgattttttaaggacgaagaaagtgtgtaatagaagaaatgtacatatagaaaattcttttaaaaaattaaataatataacttttgataatggatataataaagaaaataagatattattatctttgaaggaaatatataaattaatggttgatatacaaaataaaaacaaaatttatagagatataaaaggaaattataatagtaataataataagaagaagaatatacatgagatgaaaaagaattattataataatcttagtagttggaataattatttattatatgttcttaaaaatgatataatggaaaattcatacaatgtatcatatattatattaatattcattttaataaattatcaaaagaaaatattttatattataaatatatattataaagatataaattgccaatataaaaaaaaaaaaaaaaaagaatcttatcaaaaggattacagtcacaataataattattctttacatcttataaataatattgtcttgttaaaaaataaattctcaaataacgaaatctcccttacttcaaaaaattttaattataacttaaaaataaagaagaaatatatatataagaaaaaaaaaaaaaaaaaaaaaaaaaaaagagttcctaaaagattttggttgtatattcaaaaattattcttatataaatgttatttgattaataaaactgtaaattacaaatgtgaaaataatattttatataatcaaaaaattaattatttatataatattaaaaaaaaaaaaaattttcttttcaaaaattttatattacaaaaattattttgggtgtataaaataaataaacacaatattcaaatcaaacaaaataataataataataatgaaccgtttctttttacaaatatattatatgatagtagtataaaatatatatgtaataaattattatttatttatttttgtttaaaaaattatcatcattataatgattcgttcgatatcatgagaactaaacatatttttatgatgttatggaattatatatataatacagattattatataaaatcaaaacaggtgaataattctttagaatatattatgaatctgtacatatttcataatttattaaaattacaagtatatattataatacaaatatctcaaatgttaatacaatttatattaaaaataataaccttatggataattaatatgatgaacaatataataatgtacctttctattatttttagaatgattacaatattaaagatgttttatagtacctttattattaatatttttgtcttacacaaggatattatattatgtgatcaatatgaaaaatataatgataataaacaaattgtacataacgataattattatattaatagaagtattattttatataatttatgtaacattaaacaatatacaataaaaaattataatattattaatcagtgtattcataaattatataatatcatggttataaaacaaaaaaatacctataattatattacaaaaagttatttatgtgtatcttttttgaatcagctatattatagtaaaacacaatgtattatgatatatgagaaaaatagatattccatatcacttgatcatctgtggaaaagtaatataaatatttattttaaaaaaatattattatttttattattattattattattattttcatcatataataatttaaataataccaatgtgttacaattatatgattgttataaatataatgtgcacaataattatttgtttatttattttaatacattaatagtagcaagtatattaaatttattatatattttttattatgtatgtattaacaaattctgtatttatttatatagagattgtattatttcttttttcttattatatatatttatattatatttatataaatattataatcatataataaaaatacgtgatatttcacgtttgtcatatataatatatgttgttgttttattaatacatattatgatgtatataaaatgcttatataatttaataagaattatatcacttgttatgtttttttttgtgtttataaatacatcattgtcctatcctaatatgaagattaataatattattgcatattataataatacatataattctatttgtaaattttatttattatatattcctactatatttaatatgtataaatattcctcattattaatatgtatatattttatacatacaataaatgtttttgtgaattgtgttacttttatattattacattttattatgattttatctttttctttatttatggacatgtatatatgttccgcccctatattatatgatacacatctttccaaaaagaaaattatgaatttcgaaaaagatagaagatacacattcgtttcttatagtagttcatatgccttaatgaggacaataaatttaattcaccttaataaattatacatatatgatatcttcataaagcggaatttggtagggtgtcatgggttcacattgtttatacatgaaaaacacgaaacgaatgattatattgtgaataataattataatatagtaatagtattagtattaatattagtaggaagaaggaataggacaatacaaatagaagatagacgtattatttataagctccctgttattatattaaaccttccttccagaaagaacaaaatatatacaaatatatattcctgtgaaaaacatttcaatacaaaattgtattgtttttttatttttaaacaacgaaataataatgagatagtagacggtgtgcataatgagaagagtaagaattattatatgaacgaccatgtaaaatttgtaaaaaataaaaaatcatttttgatacaaacatatagtgatttgtaccattttaaaaattataatgataataaaatctttaataatatatccttatgttataatattaatttagaacatagaatgaataatgtacaaaaatatatccatgcagatatgtcaatacattttaagaaaaattataaaagagataaaggaataaatcaatatatttataattataaacacaatttttacttaagagtatttaattttcttttaaattttataaagagaacaaaaaatgtaataaacatagtcttgtgtatctttaaattgttaatattgacaaaagaaatattagtgtattatatccttaacttgttcatatattattatatatggttgaagtgttattttgtgttatacaatattatttatgagtatatagagagaaaggattacatgttaatgggtctgtataataacagcaagaggtttaaggataatgataaaaaggatctatttaataaaaatataaatgaggaaaaagaaaggaaagcaaaatttgtaagttgtgctacaaataatgagtataatgataataataataataatgataataataatgataataataataataataatgataataataatgataataataataataatgataataataatgataataataatgataataataataataattacaataataacaataataacaataataacaataataacaataacaataattacaataataataataatgggggtggagatcgaaatgatgagaacaatgataaagataaaaaagaagataatgataatgataatattaataatatgttagaaaatgatgatgggaaaaaaaaaagaactagaaggagaaagacaagtgataaaagtaaaaccataaataaaatgacaacgggaaggagaggtagaaaatctacgagtatgttaaatgcacatattgatgcaaataatattttaaaaaataacttgtacaatataaataatggtaattatatgaataatataaataactccatattgttaaataataatatgcaagaaaattatatgaatgataataagtcatcaaatatgcttatgaataatatccctaacaaaatgaatatgaaaatgaatgggcaaataaataatgaaattatgaacgatatgataaattataatatgaataataacatgggtaatcatatgaataataacatgggtaatcatatgaataataacatgggtaatcatatgaataatcatatatctaaccatatgaataatcatatatctaaccatatgaataatcaattgaataataatatatatgtgaataatcgagttggtattggttacatgtctaatagtgttaatcagcataatcatatgtctcctcatatgaataatacaataaatgtacataacaataataataataataataacagcaacaacaacaacaacaacaacaacaacaacaataataataataataataatagtagtagtggtagtaattgtgttaataatacattgcgtaataatttgatgaagaataactttaatcaatttaataggatggtaaataataattcaatcaatatacatacatcaagttcgaatataaataataatatgaataattataatatacatttaactcaccaaaagataaacagtaataataataatattaataataataatcttaatatgaatggcaaattgaattatcatcaaatgagtaataaagttcatggtaccgtaccaatacctatgaatgttcatatgggtggtacatccataagtaatattaaccatatgaataatataaacaatatgaacaatatgaacaatataaacaatatgggaagtagtaataggatgggcacaagcccaataaatcatcctattccacataaaaagggaggtacacatatgagcaatcaaattactagaaacgcaatgaataaaatgttaagtaaccctataaatgtagataacaaaatgaatgtgctgaacagaaaaaatagttgtaccgttaattttaatatgaataatccaatggtatcaaatatgaataattatatgaattctaataatatgaatagaaattctctacctaataatatatgtagtggtggtactataatgccaaacgttatgagtaaagggaagataaaagatacagcaataaataacaactcattcagaaataataataatataaacaatatgaacaatatgaacagtatgaaccatatgaacagtatgaaccatatgaacagtatgaaccatatgaacaatgtgaaccatatgaacaacatgaacaatgtgaatagtatgatgaataatagaatgtctgaacaaaatattatagcaaataacatgataaagacagaaatgagaaataataatttaatgaatatgaaattggtaaatagaaatcaacatatgaacatgaaatatgtgagtgaaaaatatcccatgaatactaaaatgattcagaataataatatggttactaatagagatatgaatattataaataataataatattaatggtattaataatatgggttttataaattatatgaataaaaataatactttgaataaaaatatgaaaaatataaaaacggaaaattatacttatgatcatcacttattgaaccatgatcctttaagtcctatggatacatatgatatacaacacatgaataataatataaacaatatgaataatataaacaatgtgaataatataaacaatataaataatataaacagtataaacaatataaacaatatgaatagtattcatagtgtcaacaccaaatttatgttaaacaaacaagaggatgataaaacgttacacccaaattatcttaataaccaaaacgttcaatcaaacacctattatcatcaaacaaaagaagaagaaataaatacttataataatacgcatagtagtactacgattaatatgaaaaaaaaacataagaatagtttgaaaaattcgaaagaagatgatctcaataataatcaaaatttaagaagtgtaaaaattaactggaataaatatgataacttatttaaaagaatccctttagaaagaaattatgaaggatttattttagaacagaaaaatataaaagatgaagatactattaatgatgagaaaacatttatgttagaaaataatgaagataaagaagatgatgcaatatattgtgatttatcaaatataaattttaaaacattttttaaggattataatgatatattaaataaacttaatttaataaaattaaatgataaaacaaatttcaaaaataattgttattctcaattatatgaagaaatatttttgatcattgaaaagtttttagatatatcacacttgaagtatcataataattttactcataccaatttttataataattgtttgaaatatgcaatatatcaaaataaagaaaatactaacttacataatattaaggaagaaaatgtggataataaaaatattcatggattagatattcatttaactcatgaaaataatgaaacaaataaagaggaccataatcaaaatgataataatgagaataatactaagaaaaataataataataatgatcataataatgatgatcataataatgatgatcataataataatgatattaaatatcttatattcaaagggaaatcctccatttttgatagtgtgtccaaaagttcaaataatagcatattttttaaaactctctcaaaaaagaaaaaggaattcaatgaattatgtgagaaaaataataattttgattttgtaccaagaaatgtaaaccttatacaagcaaatgaaagtaatattaatatgtacccatcaaatgctagttctctaaccatttcgaaaaataatactttaaaaaatagtgtagtcagaagcccttcaaaagatgttaatgtggaaactcctacgacatttgagaataatattgtaaataataataataataataataataatgatagtaacaataataataattataataataacctatttagttccaaaagaagcttgagcgaatcaaaattaatttttaatcaaaatgttcttatcgaagagatcttatcaaagaaatatcgaaccttctccataaacgaatttctagatgtagaactaaataataatttgaaagaattagttcgtgtgtataaaaagaatttatgttataatataaaaacatttttaaaaaaaaaaatgaaaggttcaaaaaagatgtatcatcaaaagagttattatgatacacttagccatctttttaaacatagaatgacaagaaaattgttcaaacgaataaaacgtaaatttttaaaaacaacaaaaaaacgaatcaataaaatgaaaaagaaaaaatgtaaaaaaaatatgaagaatgaagaaataagtaaacaaaaaaatggtaatattgttgatgatagtctttttttagaaacaactgatcagatcgacaaatgtgatactcgaaataaatcgactgttgatgaaaaaaatggaatggatgaatatctagatgaagaggaaaaacctcttttctcattttgttcagggagttcaaggaaaaaaaagcatatggatgatgatcgtgatcttatagaaagggggataatacgaattaaaggagaattttctgaagatagtaatataatccacagcaataatattacaagtgattctacacaaaaagggagaaaaaacacgacatccaaaatgaataaattcgtcgaaggaaaattaaattcaaacatttgtagtaaggataataattatattttatatcaagttaaaatggaagaggaccaaatggatcctcttaagattaataatgatgataataaaaatgatgataataataataatgataataataataataataataatgattgtaataataataataataatgattgtaataataataataataatgattgtaataataataataataatgattgtttatcgttagatgaaagaaaggtgtctaatgcatgtttagaaagcggtcaacagaaggaattcaaccatataaatatctccaataataacaataataataataatattaataacaataataatagtaataataatagtaatagtaatgaatctccttttagtagtaatgttagcagtaataagacgtcagggaattatgatatcaatgtatatattgaaaaagagagcatgaaaataaaatatagtatgacaaaagataaagatacaacagaggataagaaaaaaaataaaaataaagaagatacacaaataaatgaaaaattgtttaaatattcttttttgaatttatctctttatagatatatgaaaaatctagaaaatcaaagaaataaaaatacatgtgataaaattaaaaaacaacaaaaaaaaaaacaaactaatgtaaaatataaaactaatgcaattattgattttggtgaaaaaattgtttgggtttcttttgaatttaagaatttacatatgttaaaaaaaataaagaataatttcttatgctcaaattatcttaataatattcaaaatataacaaaagaaccagaagagaaatttgaaaaatatataacagatgaaatgaaaaaatataaaaatataaaaattaagttttataaattcttaacatattatgattttgttttcttaaaaaaccgattaaattttataaaaataacatataaaaatgataatgattatatgttacaaagggctggggaagaaactaaatcagcaatgggcataaataatggatcaacaaattttcaagatgaaaataaggaattgaagtttaatgattctacagattgtttgttaaatggatataaaatggacgaatgtaataatattagtaataataataataacaacattttaattaataaaaatacaaataatgaaatgtctgaaatgaataatgtaacattaaaaagtaaggtaaagaaagaatcaaaaaggttattaaaaagaaacaaattatttaatgataatatatctttatatccattaattgataaaaagaaattaaattcgtacatagacttaaatttaaatgtagatgtaaaaaaagaagaattagaaaatggatgtgaagaaaaattaaatgacaaagtattaagttttattaataaatatttatataaaggtttaaaaatagatactaaaaatgaatgctctaaaatgggaatttatgaaaattatgataaaattaaaaatatgacaataggaatggataaatcaaatgatagtattattattgacaatttcttatggtataataatccagcgctttttactatttttgaaaaatattatttattattaaaaatgcaaaaatatatattacaatataaacattattcaaaaaacaatcttaagaaaaaaattagttctgaatcaaattttgaaatgtattctagttcgacatctataaactgtacatctttgaataaattaaaaggaaaacgtagatgtataagagtgaaaacagctaattttggagaagacggttgtttattaccaaaacataatcgaaggtcaaatgtaagtaattcccatagatatatgaataatattaatgaaaagaagaaaaaaaaaggatcaattactaagcaagtcacagaaaatgatgataataataatatgaataagaataattataataataactgtaatgcagatgctcctagtacaggattagacattaacaatgaaaatgcaaccacattgattgacgaatcacaaatagctgatataaataatataaaatcagaacctattttagaaaaaaatgataaagaagaaaaaaaaggaaatgaatctatcacacaagagaagaacaaagagcatggaagtatggaaccaaacataaatatggacataaatgtggacataaatagggacataaatatggacaagaataattctgggctggtaagaaaattatgtcatgctgatgaaaatgtagaaaatgcagaaaatgtagaaaatgcagaaaatgcagaaaatgcagaaaatgtagaaaatgcagaaaatgcagaaaatgcagaaaatgcagaaaatgcagaaaatgtagacgaacaaaagaaagaaaagggggatgaaggaaaagctaacgaacttatagtagaaaagaaacaaaaggaagaagctgaagaggaagaggaagaagaagatggagatgaaaattccgtttcttcaagcagcacagttaaacaacttgacaacaatttaaatataaacggagaagtgtcgaacaacatcaaaaaggaattacaaaaaggtagaaatacaagattaggaaataataaagtgaatacaaaaagatattgttcatcacaaggcactacaccaagaggagagatgaattttctggaagatacagatgatgaaaacttaaaaagaaaaagaggaaggaaaaaaggaaaaaagcgaggtagaaaaaagggagtaaagaatgaaataaaattattaaatgaaaatattgattctaaaaaaaataaagtattatttgaaggattaatagaagaaagtaatgctaagggatataataaattaggaaataagatattaatgcaagatggaggagaaatgttagataattcattaataggaattgatgaaaaggaaaacgaattattattaaatgagttagtaccgattgataaggatataataattgatttattatgtgaagaagagaaattaatagaaagttatataaaaaattctcgttttgttgataaaaatttgatatgtttattaatatatatgaataatatacaaaagaaattaagttctatatgtaataatttattgaaaaaaataatgaaagaaaataaaatgcctacaagattatgtgataatatagagaaaagtaatgaaattacctataaatatataatgtttgaaagatggaatcaattaagatattctttattttataccataagtttaatgaattcatctatacaatataatcataatcataataataataataataataatcatcatcattttcataataatgataagaataataagaataataagaataataagaaccaattactaatttataataaaaatattaatattaattccatatttgatttacatgaatattcttgtaaacataaaaaatataaaattcctccttttgagtatagtgtttttctaaaatataaaatttataaaaaaaataaaacaagcacaaaaaaggatgatctaaatgaaaatataaaagattctaccatcaaaaatataagtgatgatataaacgattctatagatgaaaaacctaaggaagatataattcaaaatttggaagataaaaaaaataattttgctaatgatgaagaaaagttttgtggtttctcaaataataatgatttaaatataacacctgctttttcatattgttgtatatgttttaatgatgattataataccatgcaaattaatgaacaaaatgaaaatcataataactcatccagaaataattcattacagaatataacaaatgataagaaaaatgaaaatttgaataataagataaaaagtggaaagcaagatgaacaaaaagaacaagaagaaaaagaagaaaaagaagaaaaaaaagaaaatattaaaattaaggaaaataataatttacattttaaggataatgttgaaaaaattgaaagaaaagaaaatcaaaataaagaaaatacaaataataaggatatttcaccaaataatgctaaaatttataacaataataataatgataagaataatttgtataattattgccaaaataaaaagaactccaattgttctagtagtagtaacgatgtagatatgaaactcattgaaaggaatataaaaaatacacataacctaatgttaaaatgtagtagatgttatatgcatgttcataaattttgttatatatctacaaaaaagtcagatgaaaatattcttagtaatattcaaaatagtgcatcgattaatagtaatgaatggttatgtcagagatgtgaatttgaaaagaaatctttgggtaataacttcttatatatttttgatacgaatattaaatgttatatatgtatagaaagaggaggagcatttattcaaataaaaaataatatatttgttcatactttctgtgcaaccttttgtgttcctgatttattagttaataataatgtaaatttagaaatttttaatgaatatttacaattgaataatatgtctttatcacaagaaattttttcagcttttcaaaaaaaaaaaaaacaaaaaatcaatcagaaaaaaaaacaaaggaaggattatatatcggtgaaagattcaaacataaaacaactatatcataataataataataataatacagagtgtaatgatgccgaacatgtttattttaaaaaaataaaagaaagcgacaaagagataaatgaaaaggatgatcatgcacatactaatgataagattcatgatgtccttcaacatgataatgaatgtgaaaatgaaaaggaggcacattcatgcaaatccgttttttctagtaataataaaaatgaagaaatatgtgaacaaaaatgtgaacaaaaatgtgaacaaaaatgtaaagaggtaatgaaaaagaaaaaagaaaataagatctatgatttcttttcatttattaaaaaagatgataagaagagaggaaacgaatgtgcaagtactgtagagaatatacaaaaaagagtaaaactagataatatggatgaaaagaaaaatgaagactatacaaatgataatttaaatgataataaaaatagtaacacaaataataaagaaaaggaagatacaaataatgttatgtgtgataataataataatataaataaaatgaagtctcctcaaagttgtaatgttaaatatgatattaatttagatgacgatcatgataatgagagttatacttcggaagcttcttcgttatctgttgtatctagatattctataaattctatatctactttgtcagataaaaataatatgaaactttgtaataagggaaaagaaaaaaaagataaaataaaaatagaagatacttataatgatataaataaatatattaagaaggactatattttaaacggttatttgaatgaagatgttagatgtgatgtatgtttaaaaaataaaggaatatttataaaatgtcataatatgaattgtggaaagtacattcatccattatgtgcttatatgtgtggtttatttataaaatgtaaaaattccaataagaagtttttaaaatttcaaaataaaattgattattgttttcctagaatatttttttatgtaaaatgtattttgcattctataaaaaaatacggagttgtaaatatatatgatcaaataattacaagaagaacaaaatatttaaatagagatttatatcctaatatatatgaaaataataagaaagaaagaaaacctaaaaattcattaaaatataataaaatacgtaatagtaataataataataataataataataataataatagtagtagtaataattattattattttaatgttaatattaataaaaaaaatgatatatatgaaatcttggcatataattttaatcatttagattcttatcaatataatttcttcttacttccaacgattgattatatgaaaaataatatatgtttagtatgttttacttcttataagaaaagtgaattagtacattgtaaatattgtaatatgtgtgtgcacaaaaattgttatttagtagattcatcatatttagaatatcagttttatcgaaagaaaaaaaatacatgtactcttttagttcataataaagaacacaaaatagtgaatctcatatctcaaatgaaagctagaaaggaatctgtattatcatttttatatgatcagaatgtaggaaggattaataattatactacaataaataatacaacaaattcttatatcaataatcaaagtagttatagtcaagtggttgattcggaaggtttattcatgtcaccaaattattatgaaagaaaaaaaaaaaaaaaaaatcattcatttggagataatattatttcatattcattaaatgagaatgaatcaaataatgataaaattaaaatcaacaaaaatggaaatagttttcctaaggaggatttatatgacaatggacagattaataatagttgtgataattttgttcttaacaaggaggataaggatataattattgataataataataataataataataataatgaagagatttttctgaaaaattgtaaaagtgaaaagtataattgtgataatgataattgccataataataataatgaatccattattaatccttgtgttgataaaaatatggatgcaaattgtaatatcgataaattattaaataagaacgattcatatgataattttggaaagggtaatgattttaatagtggtaataatatacatggagattatatgaactctaaagataatttgatataccatgatgaaaatgtttcctttgatattgatgataataatgataataatatgaaatatagaaaggaattagaaaattctgaaatatttaaagaattaatacataacgaaattaataattgcctatttactaaagaaaatgaagaaaaagtagattttgttaataaattaagagatttttttcgaaatgataaaacttatgaatcattaaaaaaatgtactagtgaagaagaaaaatgtgtaaccgatatagatgatgtatatgaaaagaaattatttgtttgtgatttgtgtgctaataattataactatgaaaatgttaattgtatattatgtagtagaaaaggtggtgctttgaaaatggtaaaaattaatgattatataaaaatcgataaaaccaaaaataaaaaaaatagttttatgaaaaatgaaagagattatgtatttgtacatatgcaatgtgcattatatacacctcaagttgttattcaagatataaatgaggaatattatcaaatatataattatgataatattaatataaataatttaaatgaaaaagaattaatgaaaaaaaaacattatgaatcagatacagagttacaatatttaaatgtagaatataatcaagatgaaaaacaaagtttattaaatgaattctattataaacaattctgtaataatataggacaaatgaaaaatataaaaaaaggtattgataagagaaattcgctacctataagaaacacacacaaattgtatgatctgcctgaatatgagcaaatttatcctcttgacaatatgaacaatatgaacaatatgaacaataattataatgtcagtagttgtaataatatttataaaaaagtttttttcaattttaaaagaaaaaaatcagataataaagaaaaagaagaagaagaagaagaagtagcaaatattaaaataaacgattttaataatgatcaaggggaaaataaaaataaaactgaattcaatttggtaaataatcatgaaataaacacagatcaaaacgataataatcaagtgtatgataaccaaaataatgatgagtccaaaaattctaatcatgatcatattttagaaaataatcaaggtaacgatataacaaattcagtagcattaactactgttgaagatatatgtgaaaaaggtaaccaaacattaaacaacaatttggaaataaaaaaagaggaatctagtttttcaaacaaagtaacaaatgaaaacataaaaattataaatgttaatagttataacaaatggaaaagtggaagattttctgtatataacaatatttgtttcaataataaaatgaaaataaataaaagaggaacaattggaacaacaacaggaataagtggatatcatggaaatcatttaaatgtaaacaaatttattaataaaaagttaaagaaaaataaagaatatatatcatcaacatataatgataataaaaataattataagaatttaaataatataaataaaaaaatattatataatagaagaaataccaatttatattattataatttgaacaggaaaaaaaataattataaaattattataaaagatagaataaaaaaatatttaaataaaaatacttgttatatttgtaatttatcatatggatatacacaaaaatgtgtagaaaatacatgtacacattactttcatatatcatgtgcacgtatacataaattattttttgaatttgattataactttttaaaaacacatccagatagtactacaacagatttatctaaaataccgaattctatgattttctgtgaagatcattcaaaaataagaagacgtgtaaaaccatccataaaattattttcgaaattaaggtcatttctagagcttgctcgtattattgtagatcaaatgaaaaaaagagaggatatcaaaaattcgtggataacagataagtataaaaatgctctatataataatgatatgttatatgatgaagaaaatgatatcacttcatcggccctctataatgatgataataatatggaaattgttaacttacacaatgatagtaattattataattatgacgatgatgatgatgataataataatgatgatagtattgatcataataatgaagattatgaatatgaagaaaatgatccttattgtgaacaaaaatacgcatataccacatcaaaagatcattataataatgatgatgatatatcattagtacgaaacaacaaaaggaggaatagacgtttgttgaataatgttccaaatgatcatataaaaaatgaattgaacataaattatactaatgaaatgtcctctcataatatgagggagaaatcacacaatctaatgtttccttcaaatagtaatgataaggacaaaatttcctttttggtatcaaacgaaggcggagcagtaaataatgatgaacatgaaaaagaaaatgattttataaattttaaaacggaacaagaaagtatgaatgaaaataatgaaaataatgaagaaaatgaaaataatgaagaaaatgaagaaaatgaaaataatgaaaataatgaaaataatgaaaataatgaagaaatcaaagaaaaggaacctaataccttttataattcggtacaagatgataatgtaaaagcagaggattacaaggatgaaaataatgacaatgatggtgatatttag

SEQ ID NO: 72 - protein, 5757 aa, Plasmodium falciparum
MDYVHPVDVSKVIHGNESFFTFIDFLRTKKVCNRRNVHIENSFKKLNNITFDNGYNKENKILLSLKEIYKLMVDIQNKNKIYRDIKGNYNSNNNKKKNIHEMKKNYYNNLSSWNNYLLYVLKNDIMENSYNVSYIILIFILINYQKKIFYIINIYYKDINCQYKKKKKKESYQKDYSHNNNYSLHLINNIVLLKNKFSNNEISLTSKNFNYNLKIKKKYIYKKKKKKKKKKRVPKRFWLYIQKLFLYKCYLINKTVNYKCENNILYNQKINYLYNIKKKKNFLFKNFILQKLFWVYKINKHNIQIKQNNNNNNEPFLFTNILYDSSIKYICNKLLFIYFCLKNYHHYNDSFDIMRTKHIFMMLWNYIYNTDYYIKSKQVNNSLEYIMNLYIFHNLLKLQVYIIIQISQMLIQFILKIITLWIINMMNNIIMYLSIIFRMITILKMFYSTFIINIFVLHKDIILCDQYEKYNDNKQIVHNDNYYINRSIILYNLCNIKQYTIKNYNIINQCIHKLYNIMVIKQKNTYNYITKSYLCVSFLNQLYYSKTQCIMIYEKNRYSISLDHLWKSNINIYFKKILLFLLLLLLLFSSYNNLNNTNVLQLYDCYKYNVHNNYLFIYFNTLIVASILNLLYIFYYVCINKFCIYLYRDCIISFFLLYIFILYLYKYYNHIIKIRDISRLSYIIYVVVLLIHIMMYIKCLYNLIRIISLVMFFFVFINTSLSYPNMKINNIIAYYNNTYNSICKFYLLYIPTIFNMYKYSSLLICIYFIHTINVFVNCVTFILLHFIMILSFSLFMDMYICSAPILYDTHLSKKKIMNFEKDRRYTFVSYSSSYALMRTINLIHLNKLYIYDIFIKRNLVGCHGFTLFIHEKHETNDYIVNNNYNIVIVLVLILVGRRNRTIQIEDRRIIYKLPVIILNLPSRKNKIYTNIYSCEKHFNTKLYCFFIFKQRNNNEIVDGVHNEKSKNYYMNDHVKFVKNKKSFLIQTYSDLYHFKNYNDNKIFNNISLCYNINLEHRMNNVQKYIHADMSIHFKKNYKRDKGINQYIYNYKHNFYLRVFNFLLNFIKRTKNVINIVLCIFKLLILTKEILVYYILNLFIYYYIWLKCYFVLYNIIYEYIERKDYMLMGLYNNSKRFKDNDKKDLFNKNINEEKERKAKFVSCATNNEYNDNNNNNDNNNDNNNNNNDNNNDNNNNNDNNNDNNNDNNNNNYNNNNNNNNNNNNNNNNYNNNNNGGGDRNDENNDKDKKEDNDNDNINNMLENDDGKKKRTRRRKTSDKSKTINKMTTGRRGRKSTSMLNAHIDANNILKNNLYNINNGNYMNNINNSILLNNNMQENYMNDNKSSNMLMNNIPNKMNMKMNGQINNEIMNDMINYNMNNNMGNHMNNNMGNHMNNNMGNHMNNHISNHMNNHISNHMNNQLNNNIYVNNRVGIGYMSNSVNQHNHMSPHMNNTINVHNNNNNNNNSNNNNNNNNNNNNNNNNNSSSGSNCVNNTLRNNLMKNNFNQFNRMVNNNSINIHTSSSNINNNMNNYNIHLTHQKINSNNNNINNNNLNMNGKLNYHQMSNKVHGTVPIPMNVHMGGTSISNINHMNNINNMNNMNNINNMGSSNRMGTSPINHPIPHKKGGTHMSNQITRNAMNKMLSNPINVDNKMNVLNRKNSCTVNFNMNNPMVSNMNNYMNSNNMNRNSLPNNICSGGTIMPNVMSKGKIKDTAINNNSFRNNNNINNMNNMNSMNHMNSMNHMNSMNHMNNVNHMNNMNNVNSMMNNRMSEQNIIANNMIKTEMRNNNLMNMKLVNRNQHMNMKYVSEKYPMNTKMIQNNNMVTNRDMNIINNNNINGINNMGFINYMNKNNTLNKNMKNIKTENYTYDHHLLNHDPLSPMDTYDIQHMNNNINNMNNINNVNNINNINNINSINNINNMNSIHSVNTKFMLNKQEDDKTLHPNYLNNQNVQSNTYYHQTKEEEINTYNNTHSSTTINMKKKHKNSLKNSKEDDLNNNQNLRSVKINWNKYDNLFKRIPLERNYEGFILEQKNIKDEDTINDEKTFMLENNEDKEDDAIYCDLSNINFKTFFKDYNDILNKLNLIKLNDKTNFKNNCYSQLYEEIFLIIEKFLDISHLKYHNNFTHTNFYNNCLKYAIYQNKENTNLHNIKEENVDNKNIHGLDIHLTHENNETNKEDHNQNDNNENNTKKNNNNNDHNNDDHNNDDHNNNDIKYLIFKGKSSIFDSVSKSSNNSIFFKTLSKKKKEFNELCEKNNNFDFVPRNVNLIQANESNINMYPSNASSLTISKNNTLKNSVVRSPSKDVNVETPTTFENNIVNNNNNNNNNDSNNNNNYNNNLFSSKRSLSESKLIFNQNVLIEEILSKKYRTFSINEFLDVELNNNLKELVRVYKKNLCYNIKTFLKKKMKGSKKMYHQKSYYDTLSHLFKHRMTRKLFKRIKRKFLKTTKKRINKMKKKKCKKNMKNEEISKQKNGNIVDDSLFLETTDQIDKCDTRNKSTVDEKNGMDEYLDEEEKPLFSFCSGSSRKKKHMDDDRDLIERGIIRIKGEFSEDSNIIHSNNITSDSTQKGRKNTTSKMNKFVEGKLNSNICSKDNNYILYQVKMEEDQMDPLKINNDDNKNDDNNNNDNNNNNNNDCNNNNNNDCNNNNNNDCNNNNNNDCLSLDERKVSNACLESGQQKEFNHINISNNNNNNNNINNNNNSNNNSNSNESPFSSNVSSNKTSGNYDINVYIEKESMKIKYSMTKDKDTTEDKKKNKNKEDTQINEKLFKYSFLNLSLYRYMKNLENQRNKNTCDKIKKQQKKKQTNVKYKTNAIIDFGEKIVWVSFEFKNLHMLKKIKNNFLCSNYLNNIQNITKEPEEKFEKYITDEMKKYKNIKIKFYKFLTYYDFVFLKNRLNFIKITYKNDNDYMLQRAGEETKSAMGINNGSTNFQDENKELKFNDSTDCLLNGYKMDECNNISNNNNNNILINKNTNNEMSEMNNVTLKSKVKKESKRLLKRNKLFNDNISLYPLIDKKKLNSYIDLNLNVDVKKEELENGCEEKLNDKVLSFINKYLYKGLKIDTKNECSKMGIYENYDKIKNMTIGMDKSNDSIIIDNFLWYNNPALFTIFEKYYLLLKMQKYILQYKHYSKNNLKKKISSESNFEMYSSSTSINCTSLNKLKGKRRCIRVKTANFGEDGCLLPKHNRRSNVSNSHRYMNNINEKKKKKGSITKQVTENDDNNNMNKNNYNNNCNADAPSTGLDINNENATTLIDESQIADINNIKSEPILEKNDKEEKKGNESITQEKNKEHGSMEPNINMDINVDINRDINMDKNNSGLVRKLCHADENVENAENVENAENAENAENVENAENAENAENAENAENVDEQKKEKGDEGKANELIVEKKQKEEAEEEEEEEDGDENSVSSSSTVKQLDNNLNINGEVSNNIKKELQKGRNTRLGNNKVNTKRYCSSQGTTPRGEMNFLEDTDDENLKRKRGRKKGKKRGRKKGVKNEIKLLNENIDSKKNKVLFEGLIEESNAKGYNKLGNKILMQDGGEMLDNSLIGIDEKENELLLNELVPIDKDIIIDLLCEEEKLIESYIKNSRFVDKNLICLLIYMNNIQKKLSSICNNLLKKIMKENKMPTRLCDNIEKSNEITYKYIMFERWNQLRYSLFYTISLMNSSIQYNHNHNNNNNNNHHHFHNNDKNNKNNKNNKNQLLIYNKNININSIFDLHEYSCKHKKYKIPPFEYSVFLKYKIYKKNKTSTKKDDLNENIKDSTIKNISDDINDSIDEKPKEDIIQNLEDKKNNFANDEEKFCGFSNNNDLNITPAFSYCCICFNDDYNTMQINEQNENHNNSSRNNSLQNITNDKKNENLNNKIKSGKQDEQKEQEEKEEKEEKKENIKIKENNNLHFKDNVEKIERKENQNKENTNNKDISPNNAKIYNNNNNDKNNLYNYCQNKKNSNCSSSSNDVDMKLIERNIKNTHNLMLKCSRCYMHVHKFCYISTKKSDENILSNIQNSASINSNEWLCQRCEFEKKSLGNNFLYIFDTNIKCYICIERGGAFIQIKNNIFVHTFCATFCVPDLLVNNNVNLEIFNEYLQLNNMSLSQEIFSAFQKKKKQKINQKKKQRKDYISVKDSNIKQLYHNNNNNNTECNDAEHVYFKKIKESDKEINEKDDHAHTNDKIHDVLQHDNECENEKEAHSCKSVFSSNNKNEEICEQKCEQKCEQKCKEVMKKKKENKIYDFFSFIKKDDKKRGNECASTVENIQKRVKLDNMDEKKNEDYTNDNLNDNKNSNTNNKEKEDTNNVMCDNNNNINKMKSPQSCNVKYDINLDDDHDNESYTSEASSLSVVSRYSINSISTLSDKNNMKLCNKGKEKKDKIKIEDTYNDINKYIKKDYILNGYLNEDVRCDVCLKNKGIFIKCHNMNCGKYIHPLCAYMCGLFIKCKNSNKKFLKFQNKIDYCFPRIFFYVKCILHSIKKYGVVNIYDQIITRRTKYLNRDLYPNIYENNKKERKPKNSLKYNKIRNSNNNNNNNNNNNSSSNNYYYFNVNINKKNDIYEILAYNFNHLDSYQYNFFLLPTIDYMKNNICLVCFTSYKKSELVHCKYCNMCVHKNCYLVDSSYLEYQFYRKKKNTCTLLVHNKEHKIVNLISQMKARKESVLSFLYDQNVGRINNYTTINNTTNSYINNQSSYSQVVDSEGLFMSPNYYERKKKKKNHSFGDNIISYSLNENESNNDKIKINKNGNSFPKEDLYDNGQINNSCDNFVLNKEDKDIIIDNNNNNNNNNEEIFLKNCKSEKYNCDNDNCHNNNNESIINPCVDKNMDANCNIDKLLNKNDSYDNFGKGNDFNSGNNIHGDYMNSKDNLIYHDENVSFDIDDNNDNNMKYRKELENSEIFKELIHNEINNCLFTKENEEKVDFVNKLRDFFRNDKTYESLKKCTSEEEKCVTDIDDVYEKKLFVCDLCANNYNYENVNCILCSRKGGALKMVKINDYIKIDKTKNKKNSFMKNERDYVFVHMQCALYTPQVVIQDINEEYYQIYNYDNININNLNEKELMKKKHYESDTELQYLNVEYNQDEKQSLLNEFYYKQFCNNIGQMKNIKKGIDKRNSLPIRNTHKLYDLPEYEQIYPLDNMNNMNNMNNNYNVSSCNNIYKKVFFNFKRKKSDNKEKEEEEEEVANIKINDFNNDQGENKNKTEFNLVNNHEINTDQNDNNQVYDNQNNDESKNSNHDHILENNQGNDITNSVALTTVEDICEKGNQTLNNNLEIKKEESSFSNKVTNENIKIINVNSYNKWKSGRFSVYNNICFNNKMKINKRGTIGTTTGISGYHGNHLNVNKFINKKLKKNKEYISSTYNDNKNNYKNLNNINKKILYNRRNTNLYYYNLNRKKNNYKIIIKDRIKKYLNKNTCYICNLSYGYTQKCVENTCTHYFHISCARIHKLFFEFDYNFLKTHPDSTTTDLSKIPNSMIFCEDHSKIRRRVKPSIKLFSKLRSFLELARIIVDQMKKREDIKNSWITDKYKNALYNNDMLYDEENDITSSALYNDDNNMEIVNLHNDSNYYNYDDDDDDNNNDDSIDHNNEDYEYEENDPYCEQKYAYTTSKDHYNNDDDISLVRNNKRRNRRLLNNVPNDHIKNELNINYTNEMSSHNMREKSHNLMFPSNSNDKDKISFLVSNEGGAVNNDEHEKENDFINFKTEQESMNENNENNEENENNEENEENENNENNENNENNEEIKEKEPNTFYNSVQDDNVKAEDYKDENNDNDGDI

SEQ ID NO: 73 - DNA, 1651 bp, Plasmodium falciparum
atggatgtcttaagtaaagatgtttcttcagatgataatttgaagagaattgaattttttaataaggaaagtaataatatattggaagatataaaaaaagataaaatattaaaaaatgaaaaaagtgttttaaaatcgctagctctgaatgataaaaataatataaataaaataaattatacacacaataatactaatacttataaaactagtagtaataataataataataataataataataataataatagcatataccattttgatagtaatgaattgaataattgtgatttttataaaaatatatccataccagatgaactacaccattataataaagatgtagacaatatatgtaatataaataaagagaaaattaatgaaaataataacgaggtagatattgtatattcttatgtaataaatgattcacaaaaaaacatagattcaaacaatgaattaatatctatgaatatatcaattgatgaaggtgaaaattatgttttaaaaaaaaggataaagaaattaccctttttcagatatggtcattttttatgtttaacaaaaaatggctgtatactagccattggaggaacagacggaaaaaaaaaatatggattagttgaaaaatattgtatggaaaataaaaaatggaaacaaataaatatcatgcacttttcaagatccaatttttgtggtatatgtacagataataatgatttatttatattaggtggagaaggagatgaaagaatattaaaaagtgtcgaatattttgatagtaaaataaattcttggagatctttaccaccacttaactgtgtcagacattcagccagtgccattttttttcaaaacatgatttttattatagggggaaaagatggaattggagaatatgggaaagttcataaaagtgtagaaatgttaaatttgaaggaaaaaaatatgagatgggttatgtgtaaatcattgaaacaagctcgattaggattagcaactatagtttttaaggggaaaatatatgcaataggtatgaacaggatgaatcatgtgttacataaaagatggaggggggtggctgcagaatgagcacatcgtttttgtacatcaacatatgttcgttgaatatatatatatatatatatatatatatgtgtatttatttatttgattatttatttatatttatatttatattcttttaataggtggctcaacaggtgttaaaaatttaagctcagtcgaaatttacgacttccaaattaataactgggttgacggccccaatatgaacctacctagatcaaatatggtcgcctttatttgggagaaccatttggtggtatatggggggataaataaacataaaggggtaatatattctattaaatagtttattttttttagaatttatatgaatatatattatatatatttgtatttttggaaaatacgttaatgagaataaatataagagatacataaatatcatggtattatatctatttcgtttatttatttatttatttatttatttattatttattattattattttattttatttttataggaccttattaacagcgctgaaatattcaatgaaaaaaagaattgttgggaattactaaacaataatgtataa

SEQ ID NO: 74 - protein, 423 aa, Plasmodium falciparum
MDVLSKDVSSDDNLKRIEFFNKESNNILEDIKKDKILKNEKSVLKSLALNDKNNINKINYTHNNTNTYKTSSNNNNNNNNNNNNSIYHFDSNELNNCDFYKNISIPDELHHYNKDVDNICNINKEKINENNNEVDIVYSYVINDSQKNIDSNNELISMNISIDEGENYVLKKRIKKLPFFRYGHFLCLTKNGCILAIGGTDGKKKYGLVEKYCMENKKWKQINIMHFSRSNFCGICTDNNDLFILGGEGDERILKSVEYFDSKINSWRSLPPLNCVRHSASAIFFQNMIFIIGGKDGIGEYGKVHKSVEMLNLKEKNMRWVMCKSLKQARLGLATIVFKGKIYAIGGSTGVKNLSSVEIYDFQINNWVDGPNMNLPRSNMVAFIWENHLVVYGGINKHKGDLINSAEIFNEKKNCWELLNNNV

SEQ ID NO: 75 - DNA, 2478 bp, Plasmodium falciparum
atgaataatgtcaaacgtgctaacaagtccgaaatcgagaaaatttttgtggagttatgtcacgtggaaaaggaaaatcgagataaagggattgatatcctttatgattatataactaagaataggaaatgtttaaatgaacataagataacatatatatgtaaaggtttattttattattattggttatgttattcaatggaagaacagaagaagtgttctttgaaaatatgtagattaattcataaatttaatagtaagaataataaaaagaaaaagaatgtttttctttttgtacaatgttttttacaagttatgtcaaataagtatgataatttagatattcatcgattaaataaatatttatttttatttagagtgttccaagcagaaatattaatgttttttcatataaatgcttggaataatttgtatctaaagaaatataataagatatttttacaatattttgatgatactagcgaactatattataattatattgatacatttataaaagaatttttgggaaatgaatattttttaaaatccaaaaaacaagaacaacgaaattataataccaaacaatttttattattgatcgatcctttctttaaaattatttgtatgacagatcaaaaatatgttatggatcttattaacaaaaaagttttccttctcatcaaaaaaatgaaacatattaaaaaaaaattattaaaaaaaaaaattatgaaatatatacataaatgtaaagtaaaatatggattaaaaattctcaaaaatttttatgatgtaattaattcgtcttcttcaaaaaaaaataaaaaggaaaaaggaaaagataataaaggaaaagaaaaagagaaaaaagttccaatctttttggaaaatttccaaacagcatttcatactacagatgaatcaaatactatgactactccctcccagctaaaagaaaatggtaacattaaaaatatagacgaacaaaaagaaatacatttattaaaccatacaaatgtacttaataatgacaacaaattgttgaaaaatgaagatatgttaacaaataatgataaagtcaacttttctaatgatgtccaacttaataatgaatgtgtaaaagatgacgaaattcaaaataaaaaaaaaaaaaaaaaaaaggagatcacccttttggatatattaaccaaaggagggaaaaaaagaaaagcgagtcatgaccaattcgttttgcaaaaaaaaaataaaaagaatgaaaatggaaatgaaaatgaaaatgaaaaacatttaataaatggtacattaaacgagagtgatgataaggatgaagatgatgaagatgatgatgaagaagatgatgaagaagatgatgatgaagaagatgatgaagaagatgatgatgaagaagatgatgaagaagatgatgatgaagaagatgataatgatgatgataatgatgatgacaataataataataatgataataataatgataataataatgataataataatgataataataataataataataataataataatgataataataataataataataataataataataataataataataatgatgataataataataataataatgatgataataataacgatggtgttaatacatgtactagcgaattgctgatcggagaaatggaaaagaatgccgaaaaaaaaaagaaaaatataaataaaaaaatttccatttttgaaaaaagacatgatgatgaacataattttaatgcgataaataatatgcaaaaaaaatctaatgaaaataataataatcatgctgttttaaaaaatgatcaagaaaaaataccattgtattttacgaatggttcattaaattcgtctcatgtagaaaattccttaaaagaagatgaaaatataaatgaaaaaaaaaaaaaaaagaaaaaaaaaaaaacaaaaaatgtatatatcgaaagtaataatgaatataatcaaaacgatgaaaaggtggaaaacatttcatcggaatttataaaaaatgaaacacaagaaattaatgggaaggcaaacttaataaatggaaaaaagaaaaatgttataaataatgaaaatgtgcttcttacactgaacacttttgatataaagaaaaaaaataaggacacaatcacattatcaaaaaaaaaacaaaaaataaataaagaaaataagaaaaaattattgcaaaataaactaaaacaaaaaaaaaaaaaacatcataatgtaggaaagaattctgtaaaagatatatgtgaaaaaaataatgttgtaaggaaaaccattttaaaaaaagggaaatcaaaatctactgtaacaaaaaaagtacatttcaatttaaagaggaatacaattgaatacattccacgtaataaaaggaaaaatattaattcatacttacttatgaataattttagaaattttttaaatataccttcatttgtataa

SEQ ID NO: 76 - protein, 825 aa, Plasmodium falciparum
MNNVKRANKSEIEKIFVELCHVEKENRDKGIDILYDYITKNRKCLNEHKITYICKGLFYYYWLCYSMEEQKKCSLKICRLIHKFNSKNNKKKKNVFLFVQCFLQVMSNKYDNLDIHRLNKYLFLFRVFQAEILMFFHINAWNNLYLKKYNKIFLQYFDDTSELYYNYIDTFIKEFLGNEYFLKSKKQEQRNYNTKQFLLLIDPFFKIICMTDQKYVMDLINKKVFLLIKKMKHIKKKLLKKKIMKYIHKCKVKYGLKILKNFYDVINSSSSKKNKKEKGKDNKGKEKEKKVPIFLENFQTAFHTTDESNTMTTPSQLKENGNIKNIDEQKEIHLLNHTNVLNNDNKLLKNEDMLTNNDKVNFSNDVQLNNECVKDDEIQNKKKKKKKEITLLDILTKGGKKRKASHDQFVLQKKNKKNENGNENENEKHLINGTLNESDDKDEDDEDDDEEDDEEDDDEEDDEEDDDEEDDEEDDDEEDDNDDDNDDDNNNNNDNNNDNNNDNNNDNNNNNNNNNNDNNNNNNNNNNNNNNNDDNNNNNNDDNNNDGVNTCTSELLIGEMEKNAEKKKKNINKKISIFEKRHDDEHNFNAINNMQKKSNENNNNHAVLKNDQEKIPLYFTNGSLNSSHVENSLKEDENINEKKKKKKKKKTKNVYIESNNEYNQNDEKVENISSEFIKNETQEINGKANLINGKKKNVINNENVLLTLNTFDIKKKNKDTITLSKKKQKINKENKKKLLQNKLKQKKKKHHNVGKNSVKDICEKNNVVRKTILKKGKSKSTVTKKVHFNLKRNTIEYIPRNKRKNINSYLLMNNFRNFLNIPSFV

SEQ ID NO: 77 - DNA, 5163 bp, Plasmodium falciparum
atgaagatcatattctttttatgttcatttcttttttttattataaatacacaatgtgtaacacatgaaagttatcaagaacttgtcaaaaaactagaagctttagaagatgcagtattgacaggttatagtttatttcaaaaggaaaaaatggtattaaatgaagaagaaattactacaaaaggtgcaagtgctcaaagtggtgcaagtgctcaaagtggtgcaagtgctcaaagtggtgcaagtgctcaaagtggtgcaagtgctcaaagtggtgcaagtgctcaaagtggtacaagtggtccaagtggtccaagtggtacaagtccatcatctcgttcaaacactttacctcgttcaaatacttcatctggtgcaagccctccagctgatgcaagcgattcagatgctaaatcttacgctgatttaaaacacagagtacgaaattacttgttcactattaaagaactcaaatatcccgaactctttgatttaaccaatcatatgttaactttgtgtgataatattcatggtttcaaatatttaattgatggatatgaagaaattaatgaattattatataaattaaacttttattttgatttattaagagcaaaattaaatgatgtatgtgctaatgattattgtcaaatacctttcaatcttaaaattcgtgcaaatgaattagacgtacttaaaaaacttgtgttcggatatagaaaaccattagacaatattaaagataatgtaggaaaaatggaagattacattaaaaaaaataaaacaaccatagcaaatataaatgaattaattgaaggaagtaagaaaacaattgatcaaaataagaatgcagataatgaagaagggaaaaaaaaattataccaagctcaatatgatctttctatttacaataaacaattagaagaagcacataatttaataagcgttttagaaaaacgtattgacactttaaaaaaaaatgaaaacataaagaaattacttgataagataaatgaaattaaaaatcccccaccggccaattctggaaatacaccaaatactctccttgataagaacaaaaaaatcgaggaacacgaagaaaaaataaaagaaattgccaaaactattaaatttaacattgatagtttatttactgatccacttgaattagaatattatttaagagaaaaaaataaaaaagttgatgtaacacctaaatcacaagatcctacgaaatctgttcaaataccaaaagttccttatccaaatggtattgtatatcctttaccactcactgatattcataattcattagctgcagataatgataaaaattcatatggtgatttaatgaatcctcatactaaagaaaaaattaatgaaaaaattattacagataataaggaaagaaaaatattcattaataacattaaaaaaaaaattgatttagaagaaaaaaacattaatcacacaaaagaacaaaataaaaaattacttgaagattatgaaaagtcaaaaaaggattatgaagaattacttgaaaaattttatgaaatgaaatttaataataattttaacaaagatgtcgtagataaaatattcagtgcaagatatacatataatgttgaaaaacaaagatataataataaattttcatcctctaataattctgtatataatgttcaaaaattaaaaaaggctctttcatatcttgaagattattctttaagaaaaggaatttctgaaaaagattttaatcattattatactttgaaaactggcctcgaagctgatataaaaaaattaacagaagaaataaagagtagtgaaaacaaaattctagaaaaaaattttaaaggactaacacattcagcaaatggttccttagaagtatctgatattgtaaaattacaagtacaaaaagttttattaattaaaaaaatagaagacttaagaaagatagaattatttttaaaaaatgcacaactaaaagatagtattcatgtaccaaatatttataaaccacaaaataaaccagaaccatattatttaattgtattaaaaaaagaagtagataaattaaaagaatttataccaaaagtaaaagacatgttaaagaaagaacaagctgtcttatcaagtattacacaacctttagttgcagcaagcgaaacaactgaagatgggggtcactccacacacacattatcccaatcaggagaaacagaagtaacagaagaaacagaagaaacagaagaaacagtaggacacacaacaacggtaacaataacattaccaccaacacaaccatcaccaccaaaagaagtaaaagttgttgaaaattcaatagaacataagagtaatgacaattcacaagccttgacaaaaacagtttatctaaagaaattagatgaatttttaactaaatcatatatatgtcataaatatattttagtatcaaactctagtatggaccaaaaattattagaggtatataatcttactccagaagaagaaaatgaattaaaatcatgtgatccattagatttattatttaatattcaaaataacatacctgctatgtattcattatatgatagtatgaacaatgatttacaacatctcttttttgaattatatcaaaaggaaatgatttattatttacataaactaaaagaggaaaatcacatcaaaaaattattagaggagcaaaaacaaataactggaacatcatctacatccagtcctggaaatacaaccgtaaatactgctcaatccgcaactcacagtaattcccaaaaccaacaatcaaatgcatcctctaccaatacccaaaatggtgtagctgtatcatctggtcctgctgtagttgaagaaagtcatgatcccttaacagtattgtctattagtaacgatttgaaaggtattgttagtctcttaaatcttggaaataaaactaaagtacctaatccattaaccatttctacaacagagatggaaaaattttatgagaatattttaaaaaataatgatacctattttaatgatgatatcaaacaattcgtaaaatctaattcaaaagtaattacaggtttgaccgaaacacaaaaaaatgcattaaatgatgaaattaaaaaattaaaagatactttacagttatcatttgatttatataataaatataaattaaaattagatagattatttaataagaaaaaagaacttggccaagacaaaatgcaaattaaaaaacttactttattaaaagaacaattagaatcaaaattgaattcacttaataacccacataatgtattacaaaacttttctgttttctttaacaaaaaaaaagaagctgaaatagcagaaactgaaaacacattagaaaacacaaaaatattattgaaacattataaaggacttgttaaatattataatggtgaatcatctccattaaaaactttaagtgaagtatcaattcaaacagaagataattatgccaatttagaaaaatttagagtattaagtaaaatagatggaaaactcaatgataatttacatttaggaaagaaaaaattatctttcttatcaagtggattacatcatttaattactgaattaaaagaagtaataaaaaataaaaattatacaggtaattctccaagtgaaaataataagaaagttaacgaagctttaaaatcttacgaaaattttctcccagaagcaaaagttacaacagttgtaactccacctcaaccagatgtaactccatctccattatctgtaagggtaagtggtagttcaggatccacaaaagaagaaacacaaataccaacttcaggctctttattaacagaattacaacaagtagtacaattacaaaattatgacgaagaagatgattccttagttgtattacccatttttggagaatccgaagataatgacgaatatttagatcaagtagtaactggagaagcaatatctgtcacaatggataatatcctctcaggatttgaaaatgaatatgatgttatatatttaaaacctttagctggagtatatagaagcttaaaaaaacaaattgaaaaaaacatttttacatttaatttaaatttgaacgatatcttaaattcacgtcttaagaaacgaaaatatttcttagatgtattagaatctgatttaatgcaatttaaacatatatcctcaaatgaatacattattgaagattcatttaaattattgaattcagaacaaaaaaacacacttttaaaaagttacaaatatataaaagaatcagtagaaaatgatattaaatttgcacaggaaggtataagttattatgaaaaggttttagcgaaatataaggatgatttagaatcaattaaaaaagttatcaaagaagaaaaggagaagttcccatcatcaccaccaacaacacctccgtcaccagcaaaaacagacgaacaaaagaaggaaagtaagttccttccatttttaacaaacattgagaccttatacaataacttagttaataaaattgacgattacttaattaacttaaaggcaaagattaacgattgtaatgttgaaaaagatgaagcacatgttaaaataactaaacttagtgatttaaaagcaattgatgacaaaatagatctttttaaaaacccttacgacttcgaagcaattaaaaaattgataaatgatgatacgaaaaaagatatgcttggcaaattacttagtacaggattagttcaaaattttcctaatacaataatatcaaaattaattgaaggaaaattccaagatatgttaaacatttcacaacaccaatgcgtaaaaaaacaatgtccagaaaattctggatgtttcagacatttagatgaaagagaagaatgtaaatgtttattaaattacaaacaagaaggtgataaatgtgttgaaaatccaaatcctacttgtaacgaaaataatggtggatgtgatgcagatgccacatgtaccgaagaagattcaggtagcagcagaaagaaaatcacatgtgaatgtactaaacctgattcttatccacttttcgatggtattttctgcagttcctctaacttcttaggaatatcattcttattaatactcatgttaatattatacagtttcatttaa

SEQ ID NO: 78 - protein, 1720 aa, Plasmodium falciparum
MKIIFFLCSFLFFIINTQCVTHESYQELVKKLEALEDAVLTGYSLFQKEKMVLNEEEITTKGASAQSGASAQSGASAQSGASAQSGASAQSGASAQSGTSGPSGPSGTSPSSRSNTLPRSNTSSGASPPADASDSDAKSYADLKHRVRNYLFTIKELKYPELFDLTNHMLTLCDNIHGFKYLIDGYEEINELLYKLNFYFDLLRAKLNDVCANDYCQIPFNLKIRANELDVLKKLVFGYRKPLDNIKDNVGKMEDYIKKNKTTIANINELIEGSKKTIDQNKNADNEEGKKKLYQAQYDLSIYNKQLEEAHNLISVLEKRIDTLKKNENIKKLLDKINEIKNPPPANSGNTPNTLLDKNKKIEEHEEKIKEIAKTIKFNIDSLFTDPLELEYYLREKNKKVDVTPKSQDPTKSVQIPKVPYPNGIVYPLPLTDIHNSLAADNDKNSYGDLMNPHTKEKINEKIITDNKERKIFINNIKKKIDLEEKNINHTKEQNKKLLEDYEKSKKDYEELLEKFYEMKFNNNFNKDVVDKIFSARYTYNVEKQRYNNKFSSSNNSVYNVQKLKKALSYLEDYSLRKGISEKDFNHYYTLKTGLEADIKKLTEEIKSSENKILEKNFKGLTHSANGSLEVSDIVKLQVQKVLLIKKIEDLRKIELFLKNAQLKDSIHVPNIYKPQNKPEPYYLIVLKKEVDKLKEFIPKVKDMLKKEQAVLSSITQPLVAASETTEDGGHSTHTLSQSGETEVTEETEETEETVGHTTTVTITLPPTQPSPPKEVKVVENSIEHKSNDNSQALTKTVYLKKLDEFLTKSYICHKYILVSNSSMDQKLLEVYNLTPEEENELKSCDPLDLLFNIQNNIPAMYSLYDSMNNDLQHLFFELYQKEMIYYLHKLKEENHIKKLLEEQKQITGTSSTSSPGNTTVNTAQSATHSNSQNQQSNASSTNTQNGVAVSSGPAVVEESHDPLTVLSISNDLKGIVSLLNLGNKTKVPNPLTISTTEMEKFYENILKNNDTYFNDDIKQFVKSNSKVITGLTETQKNALNDEIKKLKDTLQLSFDLYNKYKLKLDRLFNKKKELGQDKMQIKKLTLLKEQLESKLNSLNNPHNVLQNFSVFFNKKKEAEIAETENTLENTKILLKHYKGLVKYYNGESSPLKTLSEVSIQTEDNYANLEKFRVLSKIDGKLNDNLHLGKKKLSFLSSGLHHLITELKEVIKNKNYTGNSPSENNKKVNEALKSYENFLPEAKVTTVVTPPQPDVTPSPLSVRVSGSSGSTKEETQIPTSGSLLTELQQVVQLQNYDEEDDSLVVLPIFGESEDNDEYLDQVVTGEAISVTMDNILSGFENEYDVIYLKPLAGVYRSLKKQIEKNIFTFNLNLNDILNSRLKKRKYFLDVLESDLMQFKHISSNEYIIEDSFKLLNSEQKNTLLKSYKYIKESVENDIKFAQEGISYYEKVLAKYKDDLESIKKVIKEEKEKFPSSPPTTPPSPAKTDEQKKESKFLPFLTNIETLYNNLVNKIDDYLINLKAKINDCNVEKDEAHVKITKLSDLKAIDDKIDLFKNPYDFEAIKKLINDDTKKDMLGKLLSTGLVQNFPNTIISKLIEGKFQDMLNISQHQCVKKQCPENSGCFRHLDEREECKCLLNYKQEGDKCVENPNPTCNENNGGCDADATCTEEDSGSSRKKITCECTKPDSYPLFDGIFCSSSNFLGISFLLILMLILYSFI

SEQ ID NO: 79 - DNA, 4835 bp, Plasmodium falciparum
atgacaaatagtaattacaaatcaaataataaaacatataatgaaaataataatgaacaaataactaccatatttaatagaacaaatatgaatccgataaaaaaatgtcatatgagagaaaaaataaataagtacttttttttgatcaaaattttgacatgcaccattttaatatgggctgtacaatatgctaataacgtaagataaaaaactaaataataaatataaataaaaaaaaaaaaaaaaaaaaaaaaaatcaactatatagtatgtataatatatatatatatatatatatatatatatttatttttatttatttattaattttttttttttttatattatctttttagtctgatataaacaagagttggaaaaaaaatacgtatgtagataagaaattgaataaactatttaacagaagtttaggagaatctcaagtaaatggtgaattagctagtgaagaagtaaaggaaaaaattcttgacttattagaagaaggaaatacattaactgaaagtgtagatgataataaaaatttagaagaagccgaagatataaaggaaaatatcttattaagtaatatagaagaaccaaaagaaaatattattgacaatttattaaataatattggacaaaattcagaaaaacaagaaagtgtatcagaaaatgtacaagtcagtgatgaactttttaatgaattattaaatagtgtagatgttaatggagaagtaaaagaaaatattttggaggaaagtcaagttaatgacgatatttttaatagtttagtaaaaagtgttcaacaagaacaacaacacaatgttgaagaaaaagttgaagaaagtgtagaagaaaatgacgaagaaagtgtagaagaaaatgtagaagaaaatgtagaagaaaatgacgacgaaagtgtagcctcaagtgttgaagaaagtatagcttcaagtgttgatgaaagtatagattcaagtattgaagaaaatgtagctccaactgttgaagaaatcgtagctccaactgttgaagaaattgtagctccaagtgttgtagaaagtgtggctccaagtgttgaagaaagtgtagaagaaaatgttgaagaaagtgtagctgaaaatgttgaagaaagtgtagctgaaaatgttgaagaaagtgtagctgaaaatgttgaagaaagtgtagctgaaaatgttgaagaaagtgtagctgaaaatgttgaagaaagtgtagctgaaaatgttgaagaaatcgtagctccaactgttgaagaaagtgtagctccaactgttgaagaaattgtagctccaagtgttgaagaaagtgtagctccaagtgttgaagaaattgtagttccaactgttgaagaaagtgtagctgaaaatgttgaagaaatcgtagctccaagtgttgaagaaatcgtagctccaagtgttgaagaaatcgtagctccaactgttgaagaaagtgtagctccaactgttgaagaaattgtagctccaagtgttgaagaaagtgtagctccaagtgttgaagaaattgtagttccaactgttgaagaaagtgtagctgaaaatgttgaagaaagtgtagctgaaaatgttgaagaaatcgtagctccaagtgttgaagaaatcgtagctccaagtgttgaagaaatcgtagctccaagtgttgaagaaatcgtagctccaagtgttgaagaaatcgtagctccaagtgttgaagaaatcgtagctccaagtgttgaagaaatcgtagctccaagtgttgaagaaatcgtagctccaagtgttgaagaaatcgtagctccaacagttgaagaaatcgtagctccaacagttgaagaaattgtagctccaagtgttgaagaaatcgtagctccaactgttgaagaaagtgttgctgaaaacgttgcaacaaatttatcagacaatcttttaagtaatttattaggtggtatcgaaactgaggaaataaaggacagtatattaaatgagatagaagaagtaaaagaaaatgtagtcaccacaatactagaaaacgtagaagaaactacagctgaaagtgtaactacttttagtaacatattagaggagatacaagaaaatactattactaatgatactatagaggaaaaattagaagaactccacgaaaatgtattaagtgccgctttagaaaatacccaaagtgaagaggaaaagaaagaagtaatagatgtaattgaagaagtaaaagaagaggtcgctaccactttaatagaaactgtggaacaggcagaagaagagagcgcaagtacaattacggaaatatttgaaaatttagaagaaaatgcagtagaaagtaatgaaaatgttgcagagaatttagagaaattaaacgaaactgtatttaatactgtattagataaagtagaggaaacagtagaaattagcggagaaagtttagaaaacaatgaaatggataaagcattttttagtgaaatatttgataatgtaaaaggaatacaagaaaatttattaacaggtatgtttcgaagtatagaaaccagtatagtaatccaatcagaagaaaaggttgatttgaatgaaaatgtggttagttcgattttagataatatagaaaatatgaaagaaggtttattaaataaattagaaaatatttcaagtactgaaggtgttcaagaaactgtaactgaacatgtagaacaaaatgtatatgtggatgttgatgttcctgctatgaaagatcaatttttaggaatattaaatgaggcaggagggttgaaagaaatgttttttaatttggaagatgtatttaaaagtgaaagtgatgtaattactgtagaagaaattaaggatgaaccggttcaaaaagaggtagaaaaagaaactgttagtattattgaagaaatggaagaaaatattgtagatgtattagaggaagaaaaagaagatttaacagacaagatgatagatgcagtagaagaatccatagaaatatcttcagattctaaagaagaaactgaatctattaaagataaagaaaaagatgtttcactagttgttgaagaagttcaagacaatgatatggatgaaagtgttgagaaagttttagaattgaaaaatatggaagaggagttaatgaaggatgctgttgaaataaatgacattactagcaaacttattgaagaaactcaagagttaaatgaagtagaagcagatttaataaaagatatggaaaaattaaaagaattagagaaagcattatcagaagattctaaagaaataatagatgcaaaagatgatacattagaaaaagttattgaagaggaacatgatataacgacgacgttggatgaagttgtagaattaaaagatgtcgaagaagacaagatcgaaaaagtatctgatttaaaagatcttgaagaagatatattaaaagaagtaaaagaaatcaaagaacttgaaagtgaaattttagaagattataaagaattaaaaactattgaaacagatattttagaagagaaaaaagaaatagaaaaagatcattttgaaaaattcgaagaagaagctgaagaaataaaagatcttgaagcagatatattaaaagaagtatcttcattagaagttgaagaagaaaaaaaattagaagaagtacacgaattaaaagaagaggtagaacatataataagtggtgatgcgcatataaaaggtttggaagaagatgatttagaagaagtagatgatttaaaaggaagtatattagacatgttaaagggagatatggaattaggggatatggataaggaaagtttagaagatgtaacagcaaaacttggagaaagagttgaatccttaaaagatgttttatctagtgcattaggcatggatgaagaacaaatgaaaacaagaaaaaaagctcaaagacctaaattggaagaagtattattaaaagaagaggttaaagaagaaccaaagaaaaaaataacaaaaaagaaagtaaggtttgatattaaggataaggaaccaaaagatgaaatagtagaagttgaaatgaaagatgaagatatagatgaagatatagaagaagatgtagaagaagatatagaagaagataaagttgaagatatagatgaagatatagatgaagatatagatgaagatataggtgaagacaaagatgaagttatagatttaatagtccaaaaagagaaacgcattgaaaaggttaaagagaaaaagaaaaaattagaaaaaaaagttgaagaaggtgttagtggtcttaaaaaacacgtagacgaagtaatgaaatatgttcaaaaaattgataaagaagttgataaagaagtatctaaagctttagaatcaaaaaatgatgttactaatgttttaaaacaaaatcaagatttttttagtaaagttaaaaacttcgtaaaaaaatataaagtatttgctgcaccattcatatctgccgttgcagcatttgcatcatatgtagttgggttctttacattttctttattttcatcatgtgtaacaatagcttcttcaacttacttattatcaaaagttgacaaaactataaataaaaataaggagagaccgttttattcatttgtatttgatatctttaagaatttaaaacattatttacaacaaatgaaagaaaaatttagtaaagaaaaaaataataatgtaatagaagtaacaaacaaagctgagaaaaaaggtaatgtacaggtaacaaataaaaccgagaaaacaactaaagttgataaaaataataaagtaccgaaaaaaagtagaacgcaaaaatcaaaataa

SEQ ID NO: 80 - protein, 1558 aa, Plasmodium falciparum
MTNSNYKSNNKTYNENNNEQITTIFNRTNMNPIKKCHMREKINKYFFLIKILTCTILIWAVQYANNSDINKSWKKNTYVDKKLNKLFNRSLGESQVNGELASEEVKEKILDLLEEGNTLTESVDDNKNLEEAEDIKENILLSNIEEPKENIIDNLLNNIGQNSEKQESVSENVQVSDELFNELLNSVDVNGEVKENILEESQVNDDIFNSLVKSVQQEQQHNVEEKVEESVEENDEESVEENVEENVEENDDESVASSVEESIASSVDESIDSSIEENVAPTVEEIVAPTVEEIVAPSVVESVAPSVEESVEENVEESVAENVEESVAENVEESVAENVEESVAENVEESVAENVEESVAENVEEIVAPTVEESVAPTVEEIVAPSVEESVAPSVEEIVVPTVEESVAENVEEIVAPSVEEIVAPSVEEIVAPTVEESVAPTVEEIVAPSVEESVAPSVEEIVVPTVEESVAENVEESVAENVEEIVAPSVEEIVAPSVEEIVAPSVEEIVAPSVEEIVAPSVEEIVAPSVEEIVAPSVEEIVAPSVEEIVAPTVEEIVAPTVEEIVAPSVEEIVAPTVEESVAENVATNLSDNLLSNLLGGIETEEIKDSILNEIEEVKENVVTTILENVEETTAESVTTFSNILEEIQENTITNDTIEEKLEELHENVLSAALENTQSEEEKKEVIDVIEEVKEEVATTLIETVEQAEEESASTITEIFENLEENAVESNENVAENLEKLNETVFNTVLDKVEETVEISGESLENNEMDKAFFSEIFDNVKGIQENLLTGMFRSIETSIVIQSEEKVDLNENVVSSILDNIENMKEGLLNKLENISSTEGVQETVTEHVEQNVYVDVDVPAMKDQFLGILNEAGGLKEMFFNLEDVFKSESDVITVEEIKDEPVQKEVEKETVSIIEEMEENIVDVLEEEKEDLTDKMIDAVEESIEISSDSKEETESIKDKEKDVSLVVEEVQDNDMDESVEKVLELKNMEEELMKDAVEINDITSKLIEETQELNEVEADLIKDMEKLKELEKALSEDSKEIIDAKDDTLEKVIEEEHDITTTLDEVVELKDVEEDKIEKVSDLKDLEEDILKEVKEIKELESEILEDYKELKTIETDILEEKKEIEKDHFEKFEEEAEEIKDLEADILKEVSSLEVEEEKKLEEVHELKEEVEHIISGDAHIKGLEEDDLEEVDDLKGSILDMLKGDMELGDMDKESLEDVTAKLGERVESLKDVLSSALGMDEEQMKTRKKAQRPKLEEVLLKEEVKEEPKKKITKKKVRFDIKDKEPKDEIVEVEMKDEDIDEDIEEDVEEDIEEDKVEDIDEDIDEDIDEDIGEDKDEVIDLIVQKEKRIEKVKEKKKKLEKKVEEGVSGLKKHVDEVMKYVQKIDKEVDKEVSKALESKNDVTNVLKQNQDFFSKVKNFVKKYKVFAAPFISAVAAFASYVVGFFTFSLFSSCVTIASSTYLLSKVDKTINKNKERPFYSFVFDIFKNLKHYLQQMKEKFSKEKNNNVIEVTNKAEKKGNVQVTNKTEKTTKVDKNNKVPKKSRTQKSK

SEQ ID NO: 81 - DNA, 1068 bp, Plasmodium falciparum
atgaaagttggtaaaatattctttttgttaaacatccttgtagtatgccacttcattatatcatgcttatgtcgaaatggacaaactactcgtgggaatttattagcattaaaagccattgaacaggatttacaacaaaagaagaatagaaaaagaaatttgattttatattcactaggttctgcagcattaatagctgcccttgtcgttacaggtataggacttaatatgtatatgaaaaagaaaaatgttgactctgaggtacaagaaattatagatgaaaaagatgaaaaagttaaagaaaaaccagctgagaaaaaaaaaactacagtaaaaatagtttccaaaagagttcctgtaaaatctaaatcttcaaatggtaaatcaaaagcacgtaccgtaaattcggaggtatctccaaaattagatgatgaaaaaaaagaagatttattaaaatttaatgataatgatcttttattagcagctgaatcattaaaagaattgaatccaaaatatgatgaaaatactcaaggaaatgattcttttaaaaatattaatgaacctagaaaacttgcttcttttagtctttatgacgcattagctgatgcttctgaacaaaataaaaacaaagatgctgaaagttctacaggtcaaatacctactccaacagaaagtagtcatggtatatcagatggtaaaaaagatacatccacaaatgatatggatcctttaaatccttatggttcatctaaaagaaattcctctgaagataaaccaacatctgaatcaaaaggcacgacaccagaatctaattttgattccaaaactcctgaaataaaggaaataaatgaaccaattatagtaccttcatattatccaactactggtccaaatcctaatacccatggaccaccaagcagaagaatttcaacatctagatcttctggatcgtccaatagaagttcatcaggaactagtacaagatccaaaggtccttctagcccattacgcgattcttcaggaagatcaagtggaagaagtaccacaccaagagtcagaaaagaataa

SEQ ID NO: 82 - protein, 355 aa, Plasmodium falciparum
MKVGKIFFLLNILVVCHFIISCLCRNGQTTRGNLLALKAIEQDLQQKKNRKRNLILYSLGSAALIAALVVTGIGLNMYMKKKNVDSEVQEIIDEKDEKVKEKPAEKKKTTVKIVSKRVPVKSKSSNGKSKARTVNSEVSPKLDDEKKEDLLKFNDNDLLLAAESLKELNPKYDENTQGNDSFKNINEPRKLASFSLYDALADASEQNKNKDAESSTGQIPTPTESSHGISDGKKDTSTNDMDPLNPYGSSKRNSSEDKPTSESKGTTPESNFDSKTPEIKEINEPIIVPSYYPTTGPNPNTHGPPSRRISTSRSSGSSNRSSSGTSTRSKGPSSPLRDSSGRSSGRSTTPRVRKE

SEQ ID NO: 83 - DNA, 25776 bp, Plasmodium falciparum
atgaaaatacctatacctaaagatgataatttcatattaatgttagataaattaagtcaggaggagaagttttttattcacatattatcaacatgtgaagatgaacatttgttaggtcatttatatccattcgttgattgggtatggttaaaatcagatttgttagcatgggctccagtattgaatagatttgatgatttattaaggaaatatatcatacacaataaattagtaatgcaaaagaaaaataacaaaaatggtgataatgagggaagtgattatatagtaatgaatgatcgaatacaaaggataacgggatgtactttagaatataattacaacaattataatgataataatgataatgataataataataatgataataataataatgataataataatgataataatagtaataatattaatagtaataataataataataataataataattgtgaaaatattaacctttcgtgtcagtcaacttgcgaaaatgggaaaaaagaatttataccttcagatttattagttgaagaaatattaagatttacttataacatattagacaattgcttaaataaaacaaaatataattcaattgaacatttaattttacttttatggagttttaatccgaaattatctattttatgtgctgagatattaaatatatattatttatttataaagaaaactaaaaaaaatgaaactaaaattaatgaaatcgtaaatttcgtatcatctattattaatattcctataccagatcatttgcatccttatataaataatgatataggtagaattaatgataataattatatatctggtttagttttatattatttacatgacaaaacaaatgaacagtatatgaagaatatatataacaaagtagaaaataaatatttcttagatttaattgattataatattgatctacaaaaaattaatattaatgttaataatatagatatatcgtttacgtctttatttccaacacatataaaatataatgaaacacaaaatatattaaataatgcctttaattatattatggaaaattataacattccagaacaatatatgtatgatgtaagacataaattaagaatatatgttggtttaatatgtcctaaatatcgaagaaagttatttaatttaagatatttaatcttatctggttctttgtctattaattctatcgtatcacctcaaattgtaactagtaacagtatatttttagaagaattattatactttttaaaatatcataaatatgtacattttaatacattacgtattatttttgatttgttaattacatctattgaatcccatttatattataaggtcgtttccgatatattaggtttacgattacatagtggtttattcattagtatatttaaatattatttaaattacttcttatcaccatatactttacaaaaggatatatgtccactatatgttatgaatgaaagtgaaagagaggtctatagtataaatgatataaatgaatattatataagaaaagctaatcctaatattaaaaattcattatatagtaaggaagacactggtcatgtttacatgaacaacgacaatacaaataacaaaagtcataataacataaataacaacaacattataaatagtaataataatttaaattactatacattatcagataacgacattttaatgaacattttgagggattctattccaccacacatgatgaatatgaacaatagcgaaataaattcattaattcaagcatcacaacatattagtaataacaataattattttaatctagtaaatacatctgttagtccatcgcaagaacaatattttacaccacgcgcttatacgcaagagcaaaatgttaataatttaaattttaattataatggtagcaatttaatgaatcaatctagcataatgaatgaacaaaatgttttctcatcaataccattggagacattaggagttattgaagcgaatcaaatgcagaatttagattcttcaaatgtgttaaattctagtggaacatctgttgatatgaacatacgatcaagtgaagttacatccctcatcaacaacaacaacaacaacaacaataatgataacaataatgataacaataatgataacaataatgataacaataatgataacaataatgataacaacaataataataacaacaacaacaacaataataataataatagtaataatagctctgtgtttacgtttggaagtgttaataaccaaggggaaagtgtgagcgcgattgataatatgaatatatttgattatataaataatactcccaatatgattaatgacaatcatttgaatattctagactatatacgtcatagtcaatcaaataataataataatgataacaataatgataacaataatgataacaataatgataacaataatgataacaataataacaataataatgataataatcagcagagtgaagggaatactgaaaaagatgaaataaaatatgagaattatattagtgaagaaacaattattaataatataaagaattgtaagaagaatggtgaaaatgaattttttaaagttactaaatcatattttaaagaatttcgtaaaaagaaaaaacatatttccatgatgttgcaattattaactttatatcatacatgtattatggaaccatgtcctatcttaaccatagctcaacaaaacaccttaaaaattttcccattatttttattagatagttctacacataatttaccaattgtacatttattattaagaattatggaaaccttattagacttcactccgaatttttatttcacagttaaagatgaagaagagttatataaaatattattatcacgttttcaatatgaattttttttgatgtctgatagtttttatcatttgaacagaaaagattatttaagatattatttcgaaccttttaattatgaaggttatgatcaagaatttatagaaacgaatgagcaaaaggagatatatataaaaaggaagcgagaagaatattttaattatgtaaatcgtatacaagatttatgtaatatgaaaaatatgaataacagtgataatattaggaatgcttgtgttaatatatttggtggtataggccctaatatatataatgggataaataatttaacagatgtttgtataaaaaatgtcatatataataatgataataataatgataataatgataatgatattgatattgataatagtacagatgacgatgatgatgatgatgataatatttggaatgttgagtgttatgatgataagactatgttttctataaaagataaattattaaaaagcctttttgaaaggtacgatgtaaatgtaaaagtaacggatgaagttttattaaatagatttaatttctggataaaattatatatatatcaagaaagaatgaaaataataaaaatgattattaaagcattaaatttagctcttaaaggttattcaccaacggataccttattagatatatttacaaataattatatatcagtgaaaattattaaatatatattaagatttccacataaatttggtttatgtttatatggatatatattaggttttatatatgaacatatttatgaagatccaactattttatcaacattattaaaagaaggaatattacatattatgttaaatggtattgttgaacaaaatctaaaagatgaaacggtcttaatatatgtaccatctttattatcactgatgtttattcatagtattggaaaatcaactatgaagaaaattaattatacaccaatatataacctttttcattttgttatacaaagagattattttttttttgatagatttggtgatattgcagtatctgttggaaatataattaatgagttagaaaattatggttttgttatgaaagactttttaatattccatgtaaaattattaaaaaatttattaataaaaggtctcaaattaggatattggaaatctatagattatgattatattgaaaaacatgtagataattcaataaaacagttacaagacatgcaattaaaagatttaaatctaaatagatataaatatagaaaagataaattcttgttagatagattatctattttgtgtagatttattttatcatatatgaaaacatcatggataaaaaattttatacacttcaatggtttaaaaattttaatgacatttacaaatctaccatgtttcccaccaaattatatacacatttttgagtatcatcccatttatagtcttattatgaaaatttacttatacgcctcatttaaaagcttatataaccaatttctttatcccctatataattttacaaattttattatgtatacgcagtatgtgaattttatattaaacaataaacttatatttgatttagacacaaatatagtagtagtaaaaaaggatgaacttagaaatatattaaaaatggaaccaaatacaaataataaacataatacgaattcttgtaataatattcataataatagagaatcagaaaatgcatataaagatttaaataagcataaaaaaaatagttacaagtaccatatggataataataaatatttgaagaaagggaatttttgcggtccatatatagatcgtaataaattgctattaactaatataactcatttgtttaatattttatattttctaatatcagcatatactgatgctaaaggattatatggaaatgaagaaaagttatatgattctcctgaaatatccaatagaaaaattttagaagttttttcagacgtcttaacttctatagaaagtgtttttgattttttctttacactttatttttatcaaacaaatgatttaaataatactatagtcctaccattaaaagataaaatatgtatacatgaacatgtaaaaagaacaattagaaataatcaaaataaatcagattatcttttatataatttatttggttgtactcgttcattatattgttattctgttaataataatttatatgatatgactaataaagataaaaaaatacattttctatgtgatgaagataattatgtaaacgattacaaatttattgatagtttaaaaaagattgacaatgatgataaggtatataaagctatatataaatatgcattttctcatgttatatcagaatttcataaatatcaaaataaaaattgtaaaactccatccgatataacaaattatagaaaagcggagaaatcgaaatttaagagatatttctctaattccgaggaatctataaaacgatcactaaggaagagcaattcgacaaatcctgctgttgctaatcatgtcaataatttgactaaaaatgtggagagcattataaataataacaacattaacaataacaacatcagcaacaataataataatattaatattaaccataacaccatcagtagcaacaacaacaataataatattaatccttttaataatatacaagccgatattttatgtaacacagatgattcaggtaattttgtagatttttccaaattatacaatatatacaatgacagatgccaacaagaatataaaaataaattaaatcatagagttaacaaagataacaaatcagaaaaatgcaaaaaatacaatgattattatatagatgataaaaatattcatatgcacacaaattatccatatgaatccaagtatgttatgtgtgaaagtttaaaatctttgctagttgttattaagaaattttttattatgattaatttagcttgtcatacgagacaactaaaaatgaagacaagccctaattacatattttataacgttatacaacagaaacatattttatgtataattagatgtataacaaaatgtatgatgaatgtacctcttgttagtaaacctatacaagaaaatagttacctagaaagaaatcatatttatcatattttatcagatcatataacacaagacaaaattaattatttaaataaattaaatgataaaaaaaataaaactaatatacacatgtcaaaaaatgtatgtaaaaattatataagaaaaatgtcaagagatgtacaagataacaatttaataaaaagtgaaaatgggaataatgtctcaacaaataatatctcctttgatatgaatcataataacatgatggatcaaaataaaaatagttccattgattatatgagtaataatattaatgttaatcattatatgtatcagacggaatgtaagaaagaagacaagtattttaatttatatgactattcatatactccctatatgaattataatgtcgaaaatatagaaggtatatatccagagactttttatatggaagagatattatttaaaagatataatttcaatttttcaaatataagtgtaacaacaaataagcaaatatatcataataaatattctaataaagaaaattgtgttaataagaatatgagtcatgttgaagaagatgcagatgaattatttgtaatggattctataaataactgcaacaacatgaacgtagacatgaacaacagtaatgacaacagcgacaacaataacaacaacaacaataataataacaacaacaataataataataataatgataataataatgatagatgtgttgatagtttaggtggagactttaatcacataaataattttagtaaatataataaaacctatatatgtaataatacaggaaatattaaaggtttagaaagcatagatcttaataatttaattaatattataaataataaaaacaaaacattaaatgaaaataattgtgatagtaaaaattatgaaggtaaagaaaagaacgaattaaaaaagaacaaatttaatgagaaaaaaatggaacaagtttcgattcatatacaagattatacaccaataaaaactataaaatatatatcagaaataattaatatattacataaattattatctgataataagttagaatttgttagttatttttattttttagatttactatacaaagtaggaacatttgattttatatttaatatgtttaattatgttatgagtgtatatatttcactattgtcattatattacaagaaaaaaaaggaaaataaacaaaactgttgttccaaatttactagttatataccaatacatgttagtagaaattatacatgtacgaatacatattttgtaagatatataattaggcttatgttatattatgcagattctgatgttaatacaataaaaacttatttacaaataacagttaaatcaataaatacattcttagatttttttataagtttaataaatatagggaaatttaatatgattttattctgttcgaaaatgttacatcccttaacaaaaatacataatcattttgagggacaacgtgttgatccaaatgtaaataaaaaagaaaatgaagaggaaaaaaatgtgagtacaaattctgaaattaaagtaaaagaagataatgataaaataaatgggcatatttttaataataacaccaatgatatacataataataataataataataataataatagtggtatatcttttgataataatataaacaatttatcaaatgaatgtatatccatacaaaataatacgaatccaaattatgaaggaattaatatgaattctggattttcaaatatttcaaatatttcaaatacacaaaatttcaataataccaatgaatcattaaactatgataataaaataaatggtgatcaaaataatttttgtacatttgaaaagaatcatatcaataatataaaagaggtaaaagatagtaacaacgaaaataatactttttcctataataataactttttattttctttagattattttgatatacttaataccataagatcagtaaaatgtgatatatccaataatatatttatgtggttaacatatattaatagtacaagtgtaaaaattggtaatttaggaagaaataatatatacattaattttagtaatactattatttataattttttaaagatcattttgaaatttattcatcattcaactgaagtagaaccaaaactcaacgaattatggatgaaggaaaaaaataaggaaaaaaaaaatgtaggtaataaagataaagaaaaagatgcttttaactatccaaatgttaatatattagaagaatggggattaatgggatttgatgaaaaaactatttatgattgcctgaactattcaggtacaactgatttagattgcacattgaattatttagataaagctaaagaaaaagaatatttctcaaatatgagtatggataaatctatgtcagaaaaaaaaaaaaaaaataaggataatttgaaatcatcctattcagagtttgatgataacagtagtgacagtttttctagtgctagtaatagaataactgatgatataataattagtcgcaacatcatgcaatgtcgtgaatataataataacttgaatgatatgataacccaagagaccataaataataatagcaatgtttttcctcttactattaataataatggtagtaatgataataataataatgataataatatatatggtgattcgtgtaataataatatttatcatagtaataacaaattggatgaggaaaaaaatgaagatatattttataaagacgataaatacattttagaaaaatttccattcatgtttgatttactcaaagaagcacagaagaaatcagtacatgcacgtatttattattatgataatattatgaatccgaataataaaagaaatatgatattttatatacaatattatttgaaatccttaagaaaaaatacatttaattcttatgaacaaaagaattatataaaagcattttggaatgaagaaaaatatcttttattaaaacaatatatatataaatatatttttaatatgcttataaatattatgctcactattccttataatgaaatatcatttatgaacttatatcttagtttcctaattatagatattgataagaaaacagttaaattgtttttagatcaatataaaaaaactatacacgataaaaatagtaataaaagtagaatatttaatcatcaagatgtaaaaataattatattatattattttatagaaaatatttctaaaaaaattaaaactttgaaaaatgatgagggtataccttatgaaccgttctatcattgccatcatatgtttatgaatttacataaaaaaaaaaataaaggacttaaaaattcagatgacagtacgaaacaggataaaaaaaaagataataaaaatattatacaaaataaattaccagatgcaagaaatatacaaaatatatataattctaattgtccaatatcttcacaaaataataatagaagtaataatataattactgcaacatctccaaatattacactcaatattagtacaataccaaatgataataatgttaatatatttaataataacaacaacaacaacaataataataataataataataataatattattatatctgttcatgatataaatccttcaacaaatatacatgtaaataataacaatataaacaatttaagtgttgtcaatacaaataataatatgcttaatataaatcatgtaaataataatcgaaatagaacaagtaatactatagaaaataatgtgctattacattacccattaaataatttggataatagttatcatagtgatgataatccattcaacgcttatcaagataataataataataataataatacaaatctagtggatgataaaaatggaaataaaaataacaaagattatcaagataaaaagatattaacaaattctccggataccttaaataatgatttaaatgatgaaaagaattgtatatatggtacaaaatatgcaaaaggagatatagatgttatttatgaatcacaaaaagatatggaaatttattcataccatttttgtttatatatgttattttttacattatataatgtacttcataaatataatatagcaaagaatttaattttaaatatggatagaaatatacttgattattgtattttctttatacaaaaatttaatatttcatatataaaatgtattgaaaataatgttaactattttttagcacttgttaaaaatgaaagaaaaatagataatcaagaacataaccaaaaagtgaaggaacaacatcatgtagaacaacgtcaatccgtattcttaaatgatgtgccatcatgtaatgttattaatgttgaaaatgtggatatgaatttaaatgaacaagatctaatatcaaagaaaaatcaagaaaaaaataaaagaaaaagaaagtataataaaatattatctcaaagtaaaggaaataccaataatttggatccatctgcttcaagtttagagagtgctgataaaattatggtatcctcatctctcgaaatagatggaaatattatcactaacaaaatgatacataatcataataataataataataataataatgagtacaattatatgggctgttgtaataataatatgaatgaagcctctattaatcttaataatgatgcaaataatatattaaaaattcatattaataataatactagtaaaaatttaaataaccccatttgcgataatcacataataacaagtaccaacaatgtaatatctgataatgaaatgaaaaaggaaaaaataaatataatgtataacaaaggtttagttataaataaaaatttagaaactcataatatgcttatcccatattggaatttagcagatgtggatagttcagtatctttgacaaaaaccgaaacaaataataatttaatggtagaaaatgaggaaaataaatatatctcattatactccaaacctccatgtttttatgcacctttgtttatgtgcttatataaaattattattaattattccttatacaattttaatgataaaaataagaaaacaaataaaaagactaaagaagaaaagtacagtgaagataaaaatatgtttttaaataatttgaaaatggaacattatagtatgttaaataaaaataatactcacataaataaatcagaaaaggtatttaatacaaatgaaaaacgaattaatgtaactgtgggtacaagtaattataatttatctaataatattaaattaccacaaacgcatatggaaaatgtaagatatgtatcaacagaaaagcagcataatattataaaaatatgtattgatacattatattttttcaaaggatataattcacatttatgtttaagtatattaagtattattgaatatttaactactacatataataatgtggttttttttataacttattctcctccaaatatttataaagattttaaaaaggtttttcaaatagaagaacaaatgcgacaaatgaatagaagaaagaatctaaatcaaaatgatgataatcaaaagagtttcgataaatttcatgtaaataataatgtaataattaatgcatcaacaaagaaagccaaggaggaactgattagtaataacgacataaatgtggaaaaagaaattcataaaaataataataatgataacaataatgacaattttaatattcctccattttattcagttgatggttttaagggagaaaattccaatttttatgaacaaaaattatcatattttgatttaaatgatttaatattaaataatatgagtagaaacagtttaggtataatattaagcatttcaaaacaagttaagtttaaagatatgctaatattattaataagtatattacttcagtgctttacagataattatgttatagctaatagaatggaatctaatttaaaatcatattttgcatctcatggtatacctgttaaatgctttatgaaaaaggatgatttggaggttattgaaaaccctaaattcgccaatgctttaggggtatcattaagtgaattaaatgaagcattatatccattcatatttaaaaacccacaaatttatgaagatatattaagttgtttgtgttttttcccaaatttaaaatatattaagaaaagtgaaacaaatgatttagagaaatttggtattaatacgaatgtcgatgatacatacaaatttttagaagaaaaaaaaaaaaaacttgatcctattggccaagtaaatacagataaaaagaaaagttcaaatttcgttatgagtacaaatgataatgtgaattttgatatgaacatagaatataataatataattaatcctagtaataatatgaatttgcaagattttactaaaatagattcattaaagaatgaaggagaaaaaataaaagaaacaaataaaaatgaagaaaatatgaatgatatatataataataacatatcaaataatatatccaataataattattacttaaatattttaccaatacctgaacatatcaaatctatttatatgttatctgaagtagcttttagtccaaggtgtttaagaaaatatcatgtcaaaaataatttttataatttttatatcctagctacattattagattttttgaatttgtttactattatacaaagtaaaactcgactagctaaattaagtggaaaagaagaaaaagagaaatttaataaagcattaatggaaatatatggtactgatgcagattttgataatgaattagaatataaagttatgtatccttttgctttaacagccgataatatgttatttataataaacttacttttaaaaacttataaacatttaatagtatatttaattaaaatacctgcttcttttaatcaaaaaattatcaaatcatttttccaaaaggaatatggtatgtatcattttagaggaagtatgttatatgtagataattcatcttttccatataatgatatagcaattaataaagaaagtagattaagtaatttttcatcaatttcaaattttagtataactagtaagaataaaaataatacagatataaatgtaaataataatacaaatgatgattcagcaatatatttattaacaaaaaataatgatgaaaataataaaaatgaatatccaattatggatttatctaatgttttatataaattaatacgttgtgattctgttaatacacatacatataaacaaatatcagaatattatttacaaaattatatgcaatattattctctttttgatttatctaatttcacttttagaagttgtttattcccatttatatatgaaaagaaatatataactgatattcataatatggatttgataaattatgtttctaatattaataattcgcataatattgtatttacgccatttttaatattcttattcaaaagaatattaccacaatttatttgtcttaattatccttccttacgtagcccatactctttaaatacatttaaaaaaaaatatcctaatatggaaaaatattatgccttaagaaataatgaaaataaaaatttaacatatctaagacatattgttaattttattcaattaatttttgatatacataatgcaaattatgatatacataaaaaggttgtattagaaataatacacttgcttaaaatacattctaactttcaaaagaaaaaagataatgtaaacaaaaatataaaagacaatgatcatgtattttctaatgttatggatatttttacatatgcaataagttcccttttatataaaatggtgaatgaagaacaaaatattaaaattcaaaaacctcctaatgtagaagatgatcaatgtataaataagaagaaaaaggtttccgaacaatttcaactacatcaaaaagggaacactaaaaaaattaaaaaaaatgacgatagtgattatagtaacgcagacacttttacatttaacaatcgtgataataataatgacaatgataataataataataataataataataataataataataataatgacgatgataataataatcacaacaataataataaccacaacaataataacaataataaccacaataataacaataataatcacaataacaacaataataataacaataataataatcacaataataataatcacaataataacaataacaacaacaataataataatcacaataacaacaacaataataataataacaataatgaagatggcaatggagaaaatgatgataacaacaaaacattttattataacagagaacaacttataatgtttcgacactctttatgtaatttattaaataaattagattattctaaagaagatttttcaaatgtagccacgtccataattagatgtctatccgttttaacatctgcgccagtcatgggatatcctataaaaacgaagaataataaattatttatgattaaactaaataaactcaatgaaaagaaaaatacaaaaataaaaaaaataaaaagaaacaaaagaagaaaaaatgtttcgtatgttacctttctaaacccatcatatgtccgctttagatcggattcaagcaataacgattctgaatgttcagatattccatattcagatgattcggatatctcgtatgaagaacacttcatttttgataatggcgaaagtgatgaagaggatgatgatattcgttatgaatacgaagaagaaatggatgatgattatatggaagaggaagaaatagtaaatcaggaagacggtgaagaagaagacgaagaagaagctattgaaggagaagacgacgaagaagcacaggatgaagaaaatgacgaagaggaaggaaataatgaaaacgaaaccttatttaatgatgagtattataatcaaacagataacaataacgataacgataacgataacaataacgataacaataatgataacaataataatttattaaatgatgaagaaaataacgatatgtctaataatgatgaggaaaatgatgtggaaagagatgacgaagatgtagaaggagatgatgacgaagatgttgaagtagatgatgacgaagaagttgatgtagatgaagatgaggaagaagttgacgtagatgaagatgaagaagaagtagaagaaatggatgatgatatggaaaatgaagatgatgatgaagatgatatagatgatgatgatgatgaagatgatgaagaagatgtagaagatgatgatgaagtagacgatgaagtagacgatgaagtagacgatgaagtagatgatgaagaagttttagatgatgaatatgatgaaattgatattgaagatgaagatgctgccgaaagaaatagtaacgaagtaaatgataataatagaaatgtacatgtacatgcatatttggtgcaagatagaaatgaaattgatgaagaccagatatatgataattctaacgatttattacttcctcacgaagtagatgaaaatgaggaaattttatcaaacatggatgataataataataacattgtatccagattggatttggtttcggatagtagtaatgatatggatgaacaaaatgttcatagaattagagaaatagatgaaacagaagaagatgaagaagatgatgatggagaggatgatgaagaagatgacgatgaagatgacgaagaggatgacgatgaagatgatgatgatgaagacgatggagaggatgatgatgaagaagatgatgaagaagatgaagatgaaggagaagaagaatatgaagatgtagaagaagaagatggagatgaagaagaacttcatataaataacagtacatataatgttaatcaaaatgtagataatattagatcgaataataataatacagatttaatagataacgaaataaatgtaaataattctctattaaattgtaatgaaaatcaacatgaaatattagatatcttattagaagaagatggagcttataatattaatgatgatatagatgaatataatgatgattatgtagacgaagtggacaataataataataataataataataataataataacaacaataacaataataataataatagaagtaataataacagttttagtaatattgttaatatagacgctcaaaatataaacaacaatcaaatgagaaatagaatgaatacaacaaatgatataggacatattaataatttacaagaaaatatcaatacaaatcatatgaattcaacttctcaatataatatgaatggtaatatttcaaatatatgtaataatacatttgcaggtcaaaaatcttcctcaaatgaaagagatgttttagaaaataatgtaaataatagtatcattattcataatgaaaatagtacacatgatcatcatataaattcttcattattagataataataaaaatcaaaatatttcaaataatataagtatgatacataatagtacaatagaaacgaaaaataatattcttcctaatgctttagaaaataacattcacaataatatagatacacaaaataatttatgtaataatgtaaatgcaaatagttgttctaataatatatatgcgaatactcaaactaaaagtgagaaaaaaggtaccataaaaaatggcatcagtttagaaaataacgaagaaaatactaatgaacatattaataaaaataatgtaatagtaggagaaaattatattctcaataataaaataaagaatgaacaaattaataatactaaagttaagaatgatcatataattgattcaaatattaataatataaataatattaaaaatgatattaatgataatattataaaagttgataaaaacaatattaaaaataacgattcatttgctgtcaaagataaaagtatgttagaatcatcagaaagtacaacaaatattagaaatgtagatgaaaataatgtaagcataattgatttgtattatcatttttatggttctaataatagggacataaatacattattaaatgaaaataatagtatcttatatttaaatgaaacgggtcaaataaattcgacacaaataaaagaaacaaacaataaaattaataataataataataataataataataacaataataacaataataacaataataacaatggtaataacacaagtgttgataataaagattctaaaaaaacagataaatcaaataatacaaatgacgctgaacaagtagcattacaattaaataataacaatactgaaggcgtagaagaatttaataatataaccagtcttaatatagaaaatttaatggatcaactgtattcaactttattaagtacagatataagaacaaatgatcttttaaacaatgaaattatatcattgcaaaatatagctaaccgtgtacaaagaaataatgattttaataatattgtagatgagagcagttataatattataggagatgatataacagaaaatcgtaatttatatgataatcgtttgaatagaaataatagtgttccatatattcatagaaatgtagaaagattaaataatttccctccattaccaacatcaaacaataatacaaatattagagcaagctggaacaatagaaatataaatcgtccaaatagcataacaaataatgttgtgaataattccctgaacaatataacaagtagtattagaaataataatttgagaaatatatttaacaatattagaaataataataataatgaaaatgtttttaataggcatagaactattaatattgttccatctattataagaaatgatataattcaaaatttatcagcatcacaccagaataacagagatccaaatagtagtagtagtagtagtaataataataataataataataataatttaaccaccaaccgagatacaaataataccaacgaaagaacaaacgaaaataacaatattcataataataataataatgagaatgataacaataataatatatcacaaacaagggttaataacaatgatcaaagacaggtgtcagatttaaataaagataaaaatcaaataaaagataaaggtagtaaaattgaaaaaacagaaatgttaactaaaaaatataacaaaaatcaagctcaatttaatatggttgatgctgttatagataatgacacgatattaaagagtgctatttgtaatagaatgtataatagattgtgtaaagctataccaaaagttcatattaaattacctttagaaaatttaattgaagagaaaaaaagaattattcaaacattgaaaaaacaaaaagaacaagaacaattacaagaaaatataaaaggaaatgataataataataataataataattccaataaagaacatcaaaatgaactagaggatgtaaacaaaaacaaaggtgatcaaaataaaaaagataaaaagggaaacaaggacaaaaaattatctcgttttactacaactacaaatgataaaaaaaaaaataccaatgaagaaaatgacataatagagtcgaatgaaaatgataatataacaaatgcacaattaggttcacataacgaacaactagaaaatactgaattgaataatgataataataataataataataatacaaacaatggatttaaccctaatgaaggtgataatgacagtgatagtgacagtaatagtgacagtaatagtgatagtgacagtgatgattataatgataacagtgataataataataataatgataataataatgataataatgataataataatgataataataatgagaatcaaaataatgtaaataatgatgaagatcatttagaagaagaaaatgaagaagattataaaaatattaattatgaagaattatttgataatattttaaatattgaatcacttcttataatttgctgttccttaggaataagtgaatctcaatttttggagctcttaaatgttgatagatcatttcttatagaattaccatcaaatttaatagatgaacttataattcaacatttaaaaaatatcaccttaacaggaattagtgaaaaggcacaagataatataaaaaacaaaaaaataatatcaattaaaatgtataagaattatctgaaatatcaagaatataaaaaatcccaagaaaataatgcatccaatgaaaataatacaaatgatatattaaataacacaacgggtaataatataacaaatgataacaataataatgataataataataataataatgataataatattaataataatgtgtcaagtgctaattcaacgacgaataattgtgctacagaatttaatgaacgacctaataatgaaaattcaagtgtaatacaaaatcttgataataatacaaatattcaaaataatataaatgatgaaaaggaacaaaatattcgtatatttaatagtataaaaaaaagctatttagaagctttaccatcaagtattagatccgaaattaaaaaaagaattataggaaatagaactgaaagaactgatgtacaagatgaaactaatatttcttttatagattctttaacgcctgaattaagaagagatgtattatcgacagctagtatacgatttataagaacattaactgacgacatgatagaagaagcgagaaacctaagattggtaatattaaataatcgtaatagtgctctaaatgcaaataatagaaatagacaaaatgtttcaaataatgatggagcaaatactacagctacaaataacagaagtgtaagtgatcgaaatgcacaaaatatgaataatataagcaatacaaataatacaagcactgtaaatgatacgaacaatacaaataatgtaagcaatgtaagcaatgtaggcaatacaaataatgtaaacagtgtaaataatgtaaacaatgtaagcaatgtaagcaatacaaataacatgaacaataataataataacaataataataatagtattagtagtagcagtaataataacagcagtagtagcagcagcaatataacatcaactaccaaccgaaatataaacggttccaatgtagcaaatttaattaacaatataagaaataatattcaagttagaattagtaatcgtgctttgagaaatgtatcaaacaatttaaataatagtaatcataaccataataatataaatattataaataatataaacaacattaatagtatcaataatatgaatattattaacaataataatatgattgtgaacaattttaatagaagtaatagaaatagtaatagactggtttttaccggagggaaccgaaataatcttaataacagacgtcgtttgaatttacctttaagaaattcactttcaaatatgcaaagaaacaattttattagaattacctataatgaaaataatgctccagttattatgataaacacaggtcatgaaaattatgacagtttaacggttactcgttttattgataatattatgggtattagaacacatgatgcactggcatctggtttgcctataggagatagtaataatagtagtaattataataataatagtaataataataataataacaataataacagtaatagtaacaataataataataataatagcaacaacaataataataacaacaataataacaacaataataacaacaataataacaacaataataacagtaatagtaataatgaacgatcaagattatttatgagtaaccaaaatagaaatgtacatcataataataatgtggatcataactatcatgttatgaatgatgataagtatttagaaaaagaagatgatatgttattgaatagatatttaaaaaatttatttccgtccatgaatagatttaatactgataattcaaaaacttcttcattatatatatgtgtagaagaaccagttccatttcaagctttaattgatatatgtagattattatttttaaagaaagaaattaataaaaaaataatgtttacattattttgtaatttaacttgttcatatcaaaaaacaaaggtatatacactacaattatttatgaacattttatggtgtgcatcagctgatttacacgcaaaaaaaaataatccatcaatagtatatttaaattctataaatttccctcctaaaatgttatattataatatgaataagaaacattatggtttattttcagataattattttattactgcatctatatcagccgaaagagtactagaacaagtacaatcattacttattaccgtaccacatatttcttcattcttttgtacatttttaatacacccatcttattttatgccaaacgatttagatgaaaacatgataactaacaatgataagggaaacgaaactaatattaatcagggtaatcataatttcatggatgttccatattatggggataaaatgataaagaatgaaaagactgatggggaaaagaaaaataatgaaataataaattatcaaaaagaaaaagatgtagaagaagaaaaagaatatgatgatgaagctgttattttagaatatgaattaaaaagaaaaagaccaaagatggatgaaaaaaaaaagcaaaaaaatcaaatatcagatatatataaaaataaaactaacataaatgataaaattagcacacaagtagatatgtctaaatatgaatatccgataaatatcttattcaaattattaaattcatctttatatttaacctctaaaaaattaatgagtcatttattatctgttatttataatttattaattaattgcgccaaaaaaaatcataattatgcaaattttacaagatgggtatatgaagaaaatttagaagaaataatcagcatggaaaatgaaaataatgaagaggaagtaacaagtgatgataataataaaaataataataataatagtagcaataataataataataatagtagcaacagtaataataacaaaatgtcaaatgataggaatggtacaaatcctgaaagaaatgtctcttgtacaaataaagaaaatacaaataaaaataaagatacaaaacaaaaacaaaataaagaaaaagaaaattttctttcttcaactaaaattgataaagaattattattaaatataaaaagtttaaaaccaatagatgaagaaatagataaaaaggatttaatttctaaaccatattatttattagaagttatatcaaaagatgcattacgtaatttaagtaaactaatatgtaattacaaaacgaactttttatggattaataatatgaataatacaacaaataataataataataataatgtaaataataatttagaacaagtacataaacaagatatttcatcactaatacaaattatggttatgtttttctctcattataaattaaaagatttaattgtacaatccttgaaacgtcatacacatgtattaataaaaagaattatttatgatttaaaaaaaattgttcattcaattcacaataaaacattcaatatatattctgttgatcattctgatagtttagaacaaaaattaattgccttctatagagttatcaccatactatttaatgcacccacactaatagatagtataacaaataaaaatgatctaaataaaagtgataccattaatttaaataatactaataatagtatatcaaatgtcgaaggtgtaaatacacctgttcaagaaaatgatcatattaataataatatatctaatgaaaatgattgtaatattaatataatgaacaatgtgccgaataataataatcaagacaatatatcaagtgaaataaatacaaacgaaacaaataataataaaagtttcgtaaacaataatgatatggacaatgaaacaattaaaaatgactatgaaaaacatataaataaaacaagagttgatgaagaaaccaaatttgatatatgcgcagatttttttctctcaataaatattgatttattgtgggaagaatttaataaaaccatgcaagttattaataattcattgattgataaaaattataaatttaaagataactattattataaagatttaaacacaactaaagatgataataagaaagaaaataataatgataagttacaaacgggtaatgttcataaaacaaatgaaaaagaagataagaatattagtaacaatttagctgatacacaagacaataacatagttaccttgtttaatacagattcttcatctaacgactgttcagatcatggtgatatatattcaaatgatagattatcaagtaatatacaaaacgaagaaataataacaaatgtagaaaatgaaaataacgatgaaaagaaaaaagaaaatgatgatgaaccacctccaacaattttaaactatctcttaccattaatggaagcctatttatttattgaagaagttatattagtatcacaatataaactaagaaaatttaaagacttagaaaaaaaagtagccagtttaaatgtagaaagcatcaaaattaatgaaaagttggcatatgatgatagcccattttatataaacatatataataaaaagaaaatgatgaagaaaaaaaataaaaaatataaaagtacaaaagagttattgctggatatatttgacgattctcatatcaatagtgatccaactaatttaaataaaattaaaagaaaaatgtgtacaaataaattagaacaacaaaaacaaaaacaagaagaagaagaagaagaagaagaagaagacgataaaaaaaaaatacaaaataattatactcacgatgattcaatgaataataatatagttgaaaatgaaaatataaatgaatgtataaatcaaaatacaaatgaaaaagatcatgttgaaggacaagaccaattggtaagaaataaattgaaaaagaaaaaattaaatgaagaccaaacgaatgataataataataataataataataataatatacagcagttaaacaaaagagaagaaatgatagtatgtggtaatcatgatcgacaggaaaaaccaaacgataaagaaaataaaaataagaataaaaataaaaatgatagaaataacgaacaacttgattccaatgtgaatcatgacaatgtggatgaaaataatacgaatagtttttataacaaaatatctaacgaacaatcaaatcataaagaagtacaagaatatcaagacagtgatatttatgatgatgataatgatgaagacgttgatcagtatggtaattattataatgaaggaaaggatgacgaagaagaagatgatgatgatgataatgatgaatatatacaaattaaattagaagataatgaaggaacaataaacagccgacataaaaaattaataaaatttgtttatatcaataggagagttattaatagcttaataaaacaaacgcccattttattacatcataacttcaaatcattaattaagttaacctcttcatgtattaattttgaaaataaaagacattatttaagaaaaaaattaaaatatttaaaatcaggtataagaagtgatccaatacgtttaagtataagaagagaaaaagtatttacagattcatattatcaattaagaaataaatctggtaatgatttaaaaggaaaacttgtagtaacatttaaaaatgaagaaggagtagatgcaggtggattaacaagagaatggtattctattttagcaaaagaaatatttaatcctaattatgctttgttttgtagagaaggaaaaaaaagtgaatttaatcatcccaatccattatcatatataaatcctgatcatttacatttctttaaatttgttggaaagtttatagctaaagctatatatgatggtcaagttattgatgcatatttttgtagatcgttttataaacatatgcttggtcgaaaaattctaccagcagatgcagaatcagtagatcctgaattttataatagtttaataaaaatatcagaatataaattagaagatttaaatttagaaattaattttagtacagaaattgatgaatttggaaaaaccaaagttatagatttaatacctaatggaagaaatattccagtaaccgatgaaaataaacataaatatattgaacttttatgtgaattaaaagtaactaatagtataaaagaacagttagaagcattcatggatggatttaaagaattaatccaaccaaaattaatatctatttttgatgataaagaattagaactacttattagtggtattccaacaattgatttaaatgatttaaaagaaaatgtagaatatcataattatactgctaattctatacaaattatttggttatgggatgtcttacaagaatttgatgaaaataaaaaagcatcattcttacaatttgttacaggtacaagtagagtgccattaggaggattcaaaaaccttatgggtatgagaggagcacaaaaaatgattatttataaagcttatggagaagaccgtttaccaacagcgcatacttgttttaatcaacttgatttaccagaatattcttcaaaagaattattgaaaagtaagttaataagggctatcatggaaggaaaagaaggattcggtttcatataa

SEQ ID NO: 84 - protein, 8591 aa, Plasmodium falciparum
MKIPIPKDDNFILMLDKLSQEEKFFIHILSTCEDEHLLGHLYPFVDWVWLKSDLLAWAPVLNRFDDLLRKYIIHNKLVMQKKNNKNGDNEGSDYIVMNDRIQRITGCTLEYNYNNYNDNNDNDNNNNDNNNNDNNNDNNSNNINSNNNNNNNNNCENINLSCQSTCENGKKEFIPSDLLVEEILRFTYNILDNCLNKTKYNSIEHLILLLWSFNPKLSILCAEILNIYYLFIKKTKKNETKINEIVNFVSSIINIPIPDHLHPYINNDIGRINDNNYISGLVLYYLHDKTNEQYMKNIYNKVENKYFLDLIDYNIDLQKININVNNIDISFTSLFPTHIKYNETQNILNNAFNYIMENYNIPEQYMYDVRHKLRIYVGLICPKYRRKLFNLRYLILSGSLSINSIVSPQIVTSNSIFLEELLYFLKYHKYVHFNTLRIIFDLLITSIESHLYYKVVSDILGLRLHSGLFISIFKYYLNYFLSPYTLQKDICPLYVMNESEREVYSINDINEYYIRKANPNIKNSLYSKEDTGHVYMNNDNTNNKSHNNINNNNIINSNNNLNYYTLSDNDILMNILRDSIPPHMMNMNNSEINSLIQASQHISNNNNYFNLVNTSVSPSQEQYFTPRAYTQEQNVNNLNFNYNGSNLMNQSSIMNEQNVFSSIPLETLGVIEANQMQNLDSSNVLNSSGTSVDMNIRSSEVTSLINNNNNNNNNDNNNDNNNDNNNDNNNDNNNDNNNNNNNNNNNNNNNSNNSSVFTFGSVNNQGESVSAIDNMNIFDYINNTPNMINDNHLNILDYIRHSQSNNNNNDNNNDNNNDNNNDNNNDNNNNNNNDNNQQSEGNTEKDEIKYENYISEETIINNIKNCKKNGENEFFKVTKSYFKEFRKKKKHISMMLQLLTLYHTCIMEPCPILTIAQQNTLKIFPLFLLDSSTHNLPIVHLLLRIMETLLDFTPNFYFTVKDEEELYKILLSRFQYEFFLMSDSFYHLNRKDYLRYYFEPFNYEGYDQEFIETNEQKEIYIKRKREEYFNYVNRIQDLCNMKNMNNSDNIRNACVNIFGGIGPNIYNGINNLTDVCIKNVIYNNDNNNDNNDNDIDIDNSTDDDDDDDDNIWNVECYDDKTMFSIKDKLLKSLFERYDVNVKVTDEVLLNRFNFWIKLYIYQERMKIIKMIIKALNLALKGYSPTDTLLDIFTNNYISVKIIKYILRFPHKFGLCLYGYILGFIYEHIYEDPTILSTLLKEGILHIMLNGIVEQNLKDETVLIYVPSLLSLMFIHSIGKSTMKKINYTPIYNLFHFVIQRDYFFFDRFGDIAVSVGNIINELENYGFVMKDFLIFHVKLLKNLLIKGLKLGYWKSIDYDYIEKHVDNSIKQLQDMQLKDLNLNRYKYRKDKFLLDRLSILCRFILSYMKTSWIKNFIHFNGLKILMTFTNLPCFPPNYIHIFEYHPIYSLIMKIYLYASFKSLYNQFLYPLYNFTNFIMYTQYVNFILNNKLIFDLDTNIVVVKKDELRNILKMEPNTNNKHNTNSCNNIHNNRESENAYKDLNKHKKNSYKYHMDNNKYLKKGNFCGPYIDRNKLLLTNITHLFNILYFLISAYTDAKGLYGNEEKLYDSPEISNRKILEVFSDVLTSIESVFDFFFTLYFYQTNDLNNTIVLPLKDKICIHEHVKRTIRNNQNKSDYLLYNLFGCTRSLYCYSVNNNLYDMTNKDKKIHFLCDEDNYVNDYKFIDSLKKIDNDDKVYKAIYKYAFSHVISEFHKYQNKNCKTPSDITNYRKAEKSKFKRYFSNSEESIKRSLRKSNSTNPAVANHVNNLTKNVESIINNNNINNNNISNNNNNININHNTISSNNNNNNINPFNNIQADILCNTDDSGNFVDFSKLYNIYNDRCQQEYKNKLNHRVNKDNKSEKCKKYNDYYIDDKNIHMHTNYPYESKYVMCESLKSLLVVIKKFFIMINLACHTRQLKMKTSPNYIFYNVIQQKHILCIIRCITKCMMNVPLVSKPIQENSYLERNHIYHILSDHITQDKINYLNKLNDKKNKTNIHMSKNVCKNYIRKMSRDVQDNNLIKSENGNNVSTNNISFDMNHNNMMDQNKNSSIDYMSNNINVNHYMYQTECKKEDKYFNLYDYSYTPYMNYNVENIEGIYPETFYMEEILFKRYNFNFSNISVTTNKQIYHNKYSNKENCVNKNMSHVEEDADELFVMDSINNCNNMNVDMNNSNDNSDNNNNNNNNNNNNNNNNNNDNNNDRCVDSLGGDFNHINNFSKYNKTYICNNTGNIKGLESIDLNNLINIINNKNKTLNENNCDSKNYEGKEKNELKKNKFNEKKMEQVSIHIQDYTPIKTIKYISEIINILHKLLSDNKLEFVSYFYFLDLLYKVGTFDFIFNMFNYVMSVYISLLSLYYKKKKENKQNCCSKFTSYIPIHVSRNYTCTNTYFVRYIIRLMLYYADSDVNTIKTYLQITVKSINTFLDFFISLINIGKFNMILFCSKMLHPLTKIHNHFEGQRVDPNVNKKENEEEKNVSTNSEIKVKEDNDKINGHIFNNNTNDIHNNNNNNNNNSGISFDNNINNLSNECISIQNNTNPNYEGINMNSGFSNISNISNTQNFNNTNESLNYDNKINGDQNNFCTFEKNHINNIKEVKDSNNENNTFSYNNNFLFSLDYFDILNTIRSVKCDISNNIFMWLTYINSTSVKIGNLGRNNIYINFSNTIIYNFLKIILKFIHHSTEVEPKLNELWMKEKNKEKKNVGNKDKEKDAFNYPNVNILEEWGLMGFDEKTIYDCLNYSGTTDLDCTLNYLDKAKEKEYFSNMSMDKSMSEKKKKNKDNLKSSYSEFDDNSSDSFSSASNRITDDIIISRNIMQCREYNNNLNDMITQETINNNSNVFPLTINNNGSNDNNNNDNNIYGDSCNNNIYHSNNKLDEEKNEDIFYKDDKYILEKFPFMFDLLKEAQKKSVHARIYYYDNIMNPNNKRNMIFYIQYYLKSLRKNTFNSYEQKNYIKAFWNEEKYLLLKQYIYKYIFNMLINIMLTIPYNEISFMNLYLSFLIIDIDKKTVKLFLDQYKKTIHDKNSNKSRIFNHQDVKIIILYYFIENISKKIKTLKNDEGIPYEPFYHCHHMFMNLHKKKNKGLKNSDDSTKQDKKKDNKNIIQNKLPDARNIQNIYNSNCPISSQNNNRSNNIITATSPNITLNISTIPNDNNVNIFNNNNNNNNNNNNNNNNIIISVHDINPSTNIHVNNNNINNLSVVNTNNNMLNINHVNNNRNRTSNTIENNVLLHYPLNNLDNSYHSDDNPFNAYQDNNNNNNNTNLVDDKNGNKNNKDYQDKKILTNSPDTLNNDLNDEKNCIYGTKYAKGDIDVIYESQKDMEIYSYHFCLYMLFFTLYNVLHKYNIAKNLILNMDRNILDYCIFFIQKFNISYIKCIENNVNYFLALVKNERKIDNQEHNQKVKEQHHVEQRQSVFLNDVPSCNVINVENVDMNLNEQDLISKKNQEKNKRKRKYNKILSQSKGNTNNLDPSASSLESADKIMVSSSLEIDGNIITNKMIHNHNNNNNNNNEYNYMGCCNNNMNEASINLNNDANNILKIHINNNTSKNLNNPICDNHIITSTNNVISDNEMKKEKINIMYNKGLVINKNLETHNMLIPYWNLADVDSSVSLTKTETNNNLMVENEENKYISLYSKPPCFYAPLFMCLYKIIINYSLYNFNDKNKKTNKKTKEEKYSEDKNMFLNNLKMEHYSMLNKNNTHINKSEKVFNTNEKRINVTVGTSNYNLSNNIKLPQTHMENVRYVSTEKQHNIIKICIDTLYFFKGYNSHLCLSILSIIEYLTTTYNNVVFFITYSPPNIYKDFKKVFQIEEQMRQMNRRKNLNQNDDNQKSFDKFHVNNNVIINASTKKAKEELISNNDINVEKEIHKNNNNDNNNDNFNIPPFYSVDGFKGENSNFYEQKLSYFDLNDLILNNMSRNSLGIILSISKQVKFKDMLILLISILLQCFTDNYVIANRMESNLKSYFASHGIPVKCFMKKDDLEVIENPKFANALGVSLSELNEALYPFIFKNPQIYEDILSCLCFFPNLKYIKKSETNDLEKFGINTNVDDTYKFLEEKKKKLDPIGQVNTDKKKSSNFVMSTNDNVNFDMNIEYNNIINPSNNMNLQDFTKIDSLKNEGEKIKETNKNEENMNDIYNNNISNNISNNNYYLNILPIPEHIKSIYMLSEVAFSPRCLRKYHVKNNFYNFYILATLLDFLNLFTIIQSKTRLAKLSGKEEKEKFNKALMEIYGTDADFDNELEYKVMYPFALTADNMLFIINLLLKTYKHLIVYLIKIPASFNQKIIKSFFQKEYGMYHFRGSMLYVDNSSFPYNDIAINKESRLSNFSSISNFSITSKNKNNTDINVNNNTNDDSAIYLLTKNNDENNKNEYPIMDLSNVLYKLIRCDSVNTHTYKQISEYYLQNYMQYYSLFDLSNFTFRSCLFPFIYEKKYITDIHNMDLINYVSNINNSHNIVFTPFLIFLFKRILPQFICLNYPSLRSPYSLNTFKKKYPNMEKYYALRNNENKNLTYLRHIVNFIQLIFDIHNANYDIHKKVVLEIIHLLKIHSNFQKKKDNVNKNIKDNDHVFSNVMDIFTYAISSLLYKMVNEEQNIKIQKPPNVEDDQCINKKKKVSEQFQLHQKGNTKKIKKNDDSDYSNADTFTFNNRDNNNDNDNNNNNNNNNNNNNNDDDNNNHNNNNNHNNNNNNNHNNNNNNHNNNNNNNNNNNHNNNNHNNNNNNNNNNNHNNNNNNNNNNNEDGNGENDDNNKTFYYNREQLIMFRHSLCNLLNKLDYSKEDFSNVATSIIRCLSVLTSAPVMGYPIKTKNNKLFMIKLNKLNEKKNTKIKKIKRNKRRKNVSYVTFLNPSYVRFRSDSSNNDSECSDIPYSDDSDISYEEHFIFDNGESDEEDDDIRYEYEEEMDDDYMEEEEIVNQEDGEEEDEEEAIEGEDDEEAQDEENDEEEGNNENETLFNDEYYNQTDNNNDNDNDNNNDNNNDNNNNLLNDEENNDMSNNDEENDVERDDEDVEGDDDEDVEVDDDEEVDVDEDEEEVDVDEDEEEVEEMDDDMENEDDDEDDIDDDDDEDDEEDVEDDDEVDDEVDDEVDDEVDDEEVLDDEYDEIDIEDEDAAERNSNEVNDNNRNVHVHAYLVQDRNEIDEDQIYDNSNDLLLPHEVDENEEILSNMDDNNNNIVSRLDLVSDSSNDMDEQNVHRIREIDETEEDEEDDDGEDDEEDDDEDDEEDDDEDDDDEDDGEDDDEEDDEEDEDEGEEEYEDVEEEDGDEEELHINNSTYNVNQNVDNIRSNNNNTDLIDNEINVNNSLLNCNENQHEILDILLEEDGAYNINDDIDEYNDDYVDEVDNNNNNNNNNNNNNNNNNNNNRSNNNSFSNIVNIDAQNINNNQMRNRMNTTNDIGHINNLQENINTNHMNSTSQYNMNGNISNICNNTFAGQKSSSNERDVLENNVNNSIIIHNENSTHDHHINSSLLDNNKNQNISNNISMIHNSTIETKNNILPNALENNIHNNIDTQNNLCNNVNANSCSNNIYANTQTKSEKKGTIKNGISLENNEENTNEHINKNNVIVGENYILNNKIKNEQINNTKVKNDHIIDSNINNINNIKNDINDNIIKVDKNNIKNNDSFAVKDKSMLESSESTTNIRNVDENNVSIIDLYYHFYGSNNRDINTLLNENNSILYLNETGQINSTQIKETNNKINNNNNNNNNNNNNNNNNNNNGNNTSVDNKDSKKTDKSNNTNDAEQVALQLNNNNTEGVEEFNNITSLNIENLMDQLYSTLLSTDIRTNDLLNNEIISLQNIANRVQRNNDFNNIVDESSYNIIGDDITENRNLYDNRLNRNNSVPYIHRNVERLNNFPPLPTSNNNTNIRASWNNRNINRPNSITNNVVNNSLNNITSSIRNNNLRNIFNNIRNNNNNENVFNRHRTINIVPSIIRNDIIQNLSASHQNNRDPNSSSSSSNNNNNNNNNLTTNRDTNNTNERTNENNNIHNNNNNENDNNNNISQTRVNNNDQRQVSDLNKDKNQIKDKGSKIEKTEMLTKKYNKNQAQFNMVDAVIDNDTILKSAICNRMYNRLCKAIPKVHIKLPLENLIEEKKRIIQTLKKQKEQEQLQENIKGNDNNNNNNNSNKEHQNELEDVNKNKGDQNKKDKKGNKDKKLSRFTTTTNDKKKNTNEENDIIESNENDNITNAQLGSHNEQLENTELNNDNNNNNNNTNNGFNPNEGDNDSDSDSNSDSNSDSDSDDYNDNSDNNNNNDNNNDNNDNNNDNNNENQNNVNNDEDHLEEENEEDYKNINYEELFDNILNIESLLIICCSLGISESQFLELLNVDRSFLIELPSNLIDELIIQHLKNITLTGISEKAQDNIKNKKIISIKMYKNYLKYQEYKKSQENNASNENNTNDILNNTTGNNITNDNNNNDNNNNNNDNNINNNVSSANSTTNNCATEFNERPNNENSSVIQNLDNNTNIQNNINDEKEQNIRIFNSIKKSYLEALPSSIRSEIKKRIIGNRTERTDVQDETNISFIDSLTPELRRDVLSTASIRFIRTLTDDMIEEARNLRLVILNNRNSALNANNRNRQNVSNNDGANTTATNNRSVSDRNAQNMNNISNTNNTSTVNDTNNTNNVSNVSNVGNTNNVNSVNNVNNVSNVSNTNNMNNNNNNNNNNSISSSSNNNSSSSSSNITSTTNRNINGSNVANLINNIRNNIQVRISNRALRNVSNNLNNSNHNHNNINIINNINNINSINNMNIINNNNMIVNNFNRSNRNSNRLVFTGGNRNNLNNRRRLNLPLRNSLSNMQRNNFIRITYNENNAPVIMINTGHENYDSLTVTRFIDNIMGIRTHDALASGLPIGDSNNSSNYNNNSNNNNNNNNNSNSNNNNNNNSNNNNNNNNNNNNNNNNNNNNNNSNSNNERSRLFMSNQNRNVHHNNNVDHNYHVMNDDKYLEKEDDMLLNRYLKNLFPSMNRFNTDNSKTSSLYICVEEPVPFQALIDICRLLFLKKEINKKIMFTLFCNLTCSYQKTKVYTLQLFMNILWCASADLHAKKNNPSIVYLNSINFPPKMLYYNMNKKHYGLFSDNYFITASISAERVLEQVQSLLITVPHISSFFCTFLIHPSYFMPNDLDENMITNNDKGNETNINQGNHNFMDVPYYGDKMIKNEKTDGEKKNNEIINYQKEKDVEEEKEYDDEAVILEYELKRKRPKMDEKKKQKNQISDIYKNKTNINDKISTQVDMSKYEYPINILFKLLNSSLYLTSKKLMSHLLSVIYNLLINCAKKNHNYANFTRWVYEENLEEIISMENENNEEEVTSDDNNKNNNNNSSNNNNNNSSNSNNNKMSNDRNGTNPERNVSCTNKENTNKNKDTKQKQNKEKENFLSSTKIDKELLLNIKSLKPIDEEIDKKDLISKPYYLLEVISKDALRNLSKLICNYKTNFLWINNMNNTTNNNNNNNVNNNLEQVHKQDISSLIQIMVMFFSHYKLKDLIVQSLKRHTHVLIKRIIYDLKKIVHSIHNKTFNIYSVDHSDSLEQKLIAFYRVITILFNAPTLIDSITNKNDLNKSDTINLNNTNNSISNVEGVNTPVQENDHINNNISNENDCNINIMNNVPNNNNQDNISSEINTNETNNNKSFVNNNDMDNETIKNDYEKHINKTRVDEETKFDICADFFLSINIDLLWEEFNKTMQVINNSLIDKNYKFKDNYYYKDLNTTKDDNKKENNNDKLQTGNVHKTNEKEDKNISNNLADTQDNNIVTLFNTDSSSNDCSDHGDIYSNDRLSSNIQNEEIITNVENENNDEKKKENDDEPPPTILNYLLPLMEAYLFIEEVILVSQYKLRKFKDLEKKVASLNVESIKINEKLAYDDSPFYINIYNKKKMMKKKNKKYKSTKELLLDIFDDSHINSDPTNLNKIKRKMCTNKLEQQKQKQEEEEEEEEEDDKKKIQNNYTHDDSMNNNIVENENINECINQNTNEKDHVEGQDQLVRNKLKKKKLNEDQTNDNNNNNNNNNIQQLNKREEMIVCGNHDRQEKPNDKENKNKNKNKNDRNNEQLDSNVNHDNVDENNTNSFYNKISNEQSNHKEVQEYQDSDIYDDDNDEDVDQYGNYYNEGKDDEEEDDDDDNDEYIQIKLEDNEGTINSRHKKLIKFVYINRRVINSLIKQTPILLHHNFKSLIKLTSSCINFENKRHYLRKKLKYLKSGIRSDPIRLSIRREKVFTDSYYQLRNKSGNDLKGKLVVTFKNEEGVDAGGLTREWYSILAKEIFNPNYALFCREGKKSEFNHPNPLSYINPDHLHFFKFVGKFIAKAIYDGQVIDAYFCRSFYKHMLGRKILPADAESVDPEFYNSLIKISEYKLEDLNLEINFSTEIDEFGKTKVIDLIPNGRNIPVTDENKHKYIELLCELKVTNSIKEQLEAFMDGFKELIQPKLISIFDDKELELLISGIPTIDLNDLKENVEYHNYTANSIQIIWLWDVLQEFDENKKASFLQFVTGTSRVPLGGFKNLMGMRGAQKMIIYKAYGEDRLPTAHTCFNQLDLPEYSSKELLKSKLIRAIMEGKEGFGFI

What is claimed is:

1. An immunogenic composition comprising isolated proteins, or immunogenic fragments or derivatives, thereof, wherein said proteins are associated with sterile immunity against malaria.

2. The immunogenic composition of claim 1, wherein the composition comprises one or more of said the isolated proteins, immunogenic fragments or derivatives, wherein said isolated proteins are associated with the loci selected from the group consisting of PF10925w; PFB0285c; PF14_{—}0051; PFD0485w; PFL1620w; PF10_{—}0211; PFB0150c; PFE0060w; PF08_{—}0034; PF08_{—}0054; PFL2140c; PFC0210c; PFE1085w; PF11_{—}0404; PFL2505c; PF13_{—}0222; and MAL13P1.22 or immunogenic fragments or derivatives, thereof.

3. The immunogenic composition of claim 2, wherein the composition also comprises one or both of the isolated proteins, immunogenic fragments or derivatives associated with the loci PF11_{—}0344 and PFf13_{—}0201 or immunogenic fragments or derivatives, thereof.

4. The immunogenic composition of claim 2, wherein said isolated proteins have the amino acid sequences selected from the group consisting of SEQ ID NOs: 2, 4, 6, 8, 10, 12, 14, 18, 20, 22, 24, 26, 28, 30, 34, 36 and 38, or immunogenic fragments or derivatives, thereof.

5. The immunogenic composition of claim 4, wherein said composition also comprises one or both of the proteins with amino acid sequences of SEQ ID NOs.: 16 and 32, or immunogenic fragments or derivatives, thereof.

6. An immunogenic composition comprising one or more isolated nucleic acid molecules encoding one or more proteins, or immunogenic fragments or derivatives, wherein said proteins are associated with sterile immunity against malaria, wherein said isolated nucleic acid molecules are expressed in an expression vector capable of expression in a mammal.

7. The immunogenic composition of claim 6, wherein said nucleic acid molecules are encoded by the nucleic acid sequences selected from the group consisting of SEQ ID NOs: 1, 3, 5, 7, 9, 11, 13, 17, 19, 21, 23, 25, 27, 29, 33, 35, and 37 or a substantial portion or ortholog, thereof.

8. The immunogenic composition of claim 6, wherein said composition also comprises one or both of the DNA sequences 15 and 31 or a substantial portion or ortholog, thereof.

9. A method of inducing an immune response against malaria in a mammal, which method comprises administering to a mammal a composition comprising one or more isolated nucleic acid molecules, inserted into a suitable expression vector, encoding isolated malaria polypeptides, wherein said isolated nucleic acid molecules are as in claim 4 or 5.

10. The method of claim 9, where the suitable expression system is a DNA plasmid or replicating or nonreplicating viral vector.

11. The method of claim 9, wherein said method further comprises one or more priming and one or more boosting immunizations, wherein said priming immunizations comprise one or more malaria polypeptides, as in claim 2 or 3, or comprise a composition comprising one or more said isolated nucleic acid molecules, as in claim 7 or 8, inserted into a suitable expression vector, and wherein said boosting immunizations comprise a malaria polypeptide, as in claim 2 or 3, or comprise a composition comprising one or more isolated nucleic acid molecules, as in claim 7 or 8, inserted into suitable expression vector.

12. The method of claim 9, wherein said suitable expression vector is selected from the group consisting of DNA plasmid alphavirus replicon, adenovirus, poxvirus, adenoassociated virus, cytomegalovirus, canine distemper virus, yellow fever virus and retrovirus.

13. The method of claim 11, wherein said suitable expression vector is selected from the group consisting of DNA plasmid, alphavirus replicon, adenovirus, poxvirus, adenoassociated virus, cytomegalovirus, canine distemper virus, yellow fever virus and retrovirus.

14. The method of 11, wherein said priming immunization vector is an alphavirus vector and said boosting immunization vector is nonalphavirus vector.

15. The method of claim 11, wherein said priming immunization comprises an expression vector that is a DNA plasmid or an adenovirus and the boosting immunization is selected from the group consisting of adenovirus, adenovirus heterologous to the priming adenovirus, poxvirus and polypeptide, wherein said polypeptides have amino acid sequences as in claim 4.

16. The method of claim 12, wherein the alphavirus replicon preparation is selected from the group consisting of RNA replicons, DNA replicons and alphavirus replicon particles.

17. The method of claim 12, wherein the alphavirus is selected from the group consisting of Venzuelean Equine Encephalitis Virus, Semliki Forest Virus and Sindbis Virus.

18. The method of claim 14, wherein the non-alphavirus viral expression system is selected from the group consisting of poxvirus, adenovirus, adeno-associated virus and retrovirus.

19. The method of claim 15, wherein the poxvirus is selected from the group consisting of cowpox, canarypox, vaccinia, modified vaccinia Ankara, or fowlpox.
